(19) United States
(12) Patent Application Publication
(10) Pub. No.: US 2025/0297289 A1
(43) Pub. Date: Sep. 25, 2025

(54) SYSTEMS AND METHODS FOR RNA-GUIDED DNA INTEGRATION

(71) Applicant: The Trustees of Columbia University in the City of New York, New York, NY (US)

(72) Inventors: Samuel Henry Sternberg, New York, NY (US); George Davis Lampe, New York, NY (US)

(21) Appl. No.: 19/230,907

(22) Filed: Jun. 6, 2025

Related U.S. Application Data
(63) Continuation of application No. PCT/US2023/082968, filed on Dec. 7, 2023.
(60) Provisional application No. 63/386,446, filed on Dec. 7, 2022.
(60) Provisional application No. 63/490,689, filed on Mar. 16, 2023.
(60) Provisional application No. 63/502,758, filed on May 17, 2023.

(51) Int. Cl. C12N 15/90; C12N 9/12; C12N 9/22; C12N 15/11

(52) U.S. Cl. CPC C12N 15/907; C12N 9/1241; C12N 9/226; C12N 15/111; C12N 2310/20; C12Y 207/07; C12Y 306/0401

(57) ABSTRACT

The present disclosure provides methods and systems for DNA modification and gene targeting comprising an engineered Clustered Regularly Interspaced Short Palindromic Repeats (CRISPR)-associated transposon (CAST) systems. More particularly, the present disclosure provides systems comprising: an engineered CAST system or one or more nucleic acids encoding the engineered CAST system, wherein the CAST system comprises at least one or both of: a) at least one Cas protein (e.g., Cas6, Cas7, Cas5, and/or Cas8) and b) one or more transposon-associated proteins (e.g., TnsA, TnsB, TnsC, TnsD, and/or TniQ), and at least one unfoldase protein (e.g., ClpX), or a nucleic acid encoding thereof. The present disclosure also provides systems, kits, and methods for nucleic acid modification in a cell.

### CROSS-REFERENCE TO RELATED APPLICATIONS

[0001] This application is a continuation of PCT International Application No. PCT/US2023/082968, filed Dec. 7, 2023, which claims the benefit of U.S. Provisional Application Nos. 63/386,446, filed Dec. 7, 2022, 63/490,689, filed Mar. 16, 2023, and 63/502,758, filed May 17, 2023, the contents of which are herein incorporated by reference in their entirety.

### STATEMENT REGARDING FEDERALLY SPONSORED RESEARCH OR DEVELOPMENT

[0002] This invention was made with government support under grant number HG011650 awarded by the National Institutes of Health. The government has certain rights in the invention.

### FIELD

[0003] The present disclosure relates to methods and systems for DNA modification and gene targeting comprising an engineered Clustered Regularly Interspaced Short Palindromic Repeats (CRISPR)-associated transposon (CAST) systems. Particularly, the present disclosure relates systems comprising: an engineered CAST system or one or more nucleic acids encoding the engineered CAST system, wherein the CAST system comprises at least one or both of: a) at least one Cas protein (e.g., Cas6, Cas7, Cas5, and/or Cas8) and b) one or more transposon-associated proteins (e.g., TnsA, TnsB, TnsC, TnsD, and/or TniQ), and at least one unfoldase protein (e.g., ClpX), or a nucleic acid encoding thereof.

### SEQUENCE LISTING STATEMENT

[0004] The content of the electronic sequence listing titled COLUM_41446_601_SequenceListing.xml (Size: 811,033 bytes; and Date of Creation: Dec. 7, 2023) is herein incorporated by reference in its entirety.

### BACKGROUND

[0005] CRISPR-Cas systems can be used for programmable DNA integration, in which the nuclease-deficient CRISPR-Cas machinery (either Cascade from Type I systems, or Cas12 from Type V systems) coordinates with Tn7 transposon-associated proteins to mediate RNA-guided DNA targeting and DNA integration, respectively. This activity may be leveraged in bacterial or eukaryotic cells for the targeted integration of user-defined genetic payloads at user-defined genomic loci, via a mechanism that obviates requirements for DNA double-strand breaks (DSBs) necessary for homology-directed repair.

### SUMMARY

[0006] Provided herein are systems for RNA-guided DNA modification.

[0007] In some embodiments, the systems comprise: a) an engineered Clustered Regularly Interspaced Short Palindromic Repeats (CRISPR)-associated transposon (CAST) system or one or more nucleic acids encoding the engineered CAST system, wherein the CAST system comprises at least one or all of: i) at least one Cas protein; ii) at least one transposon-associated protein; and iii) at least one guide RNA (gRNA) complementary to at least a portion of a target nucleic acid sequence; and b) an unfoldase protein, or a nucleic acid encoding thereof.

[0008] In some embodiments, the at least one Cas protein is derived from a Type I CRISPR-Cas system. In some embodiments, the engineered CRISPR-Tn system is a Type I-F system. In some embodiments, the at least one Cas protein comprises Cas5, Cas6, Cas7, and Cas8. In some embodiments, the at least one Cas protein comprises a Cas8-Cas5 fusion protein.

[0009] In some embodiments, the at least one Cas protein is derived from a Type V CRISPR-Cas system. In some embodiments, the engineered CRISPR-Tn system is a Type V-K system. In some embodiments, the at least one Cas protein comprises Cas12k.

[0010] In some embodiments, the at least one transposon protein is derived from a Tn7 or Tn7-like transposon system. In some embodiments, the at least one transposon-associated protein comprises TnsA, TnsB, TnsC, or a combination thereof. In some embodiments, the at least one transposon protein comprises a TnsA-TnsB fusion protein. In some embodiments, the at least one transposon-associated protein comprises TnsD and/or TniQ.

[0011] In some embodiments, the at least one gRNA is a non-naturally occurring gRNA. In some embodiments, the at least one gRNA is encoded in a CRISPR RNA (crRNA) array.

[0012] In some embodiments, the one or more nucleic acids encoding the engineered CAST system comprises one or more messenger RNAs, one or more vectors, or a combination thereof. In some embodiments, the at least one Cas protein, the at least one transposon-associated protein, and the at least one gRNA are encoded by different nucleic acids. In some embodiments, one or more of the at least one Cas protein, the at least one transposon-associated protein, and the at least one gRNA are encoded by a single nucleic acid.

[0013] In some embodiments, the at least one unfoldase protein comprises ClpX. In some embodiments, the at least one unfoldase protein is derived from same or different organism as that of the engineered CAST system.

[0014] In some embodiments, the nucleic acid encoding the at least one unfoldase protein (e.g., ClpX) comprises at least one messenger RNA, at least one vector, or a combination thereof. In some embodiments, the at least one unfoldase protein is encoded on a nucleic acid encoding one or more of: the at least one Cas protein, the at least one transposon-associated protein, and the at least one gRNA.

[0015] Also provided herein are compositions and cells comprising a present system. In some embodiments, the cell is a prokaryotic cell. In some embodiments, the cell is a eukaryotic cell (e.g., a mammalian cell, a human cell).

[0016] Further provided are methods for DNA integration comprising contacting a target nucleic acid sequence with a system or composition as disclosed herein.

[0017] In some embodiments, the target nucleic acid sequence is in a cell. In some embodiments, the contacting a target nucleic acid sequence comprises introducing the system into the cell. In some embodiments, the cell is a prokaryotic cell. In some embodiments, the cell is a eukaryotic cell (e.g., a mammalian cell, a human cell).

[0018] In some embodiments, introducing the system into the cell comprises administering the system to a subject. In some embodiments, the administering comprises in vivo administration. In some embodiments, the administering comprises transplantation of ex vivo treated cells comprising the system.

[0019] Other aspects and embodiments of the disclosure will be apparent in light of the following detailed description.

### BRIEF DESCRIPTION OF THE DRAWINGS

[0020] FIGS. 1A-1E show reconstitution of protein-RNA CAST components in human cells. FIG. 1A is a schematic detailing DNA integration using RNA-guided transposases. FIG. 1B shows Type I-F CRISPR-associated transposons encode the CRISPR RNA and seven proteins needed for DNA integration (top). Mammalian expression vectors used for heterologous reconstitution in human cells are shown at bottom. FIG. 1C shows western blotting with anti-FLAG antibody demonstrates robust protein expression upon individual (−) or multi-plasmid (+) co-transfection of HEK293T cells. Co-transfections contained all VchCAST components, with the FLAG-tagged subunit(s) indicated. β-actin was used as a loading control. Western blots were repeated in biological duplicates with similar results. FIG. 1D is a schematic of eGFP knockdown assay to monitor crRNA processing by Cas6 in HEK293T cells. Cleavage of the CRISPR direct repeat (DR)-encoded stem-loop severs the 5′-cap from the ORF and polyA (pA) tail, leading to a loss of eGFP fluorescence (bottom). FIG. 1E shows transposon-encoded VchCas6 (Type I-F3) exhibits efficient RNA cleavage and eGFP knockdown, as measured by flow cytometry. Knockdown was comparable to PseCas6 from a canonical CRISPR-Cas system (Type I-E), was absent with a non-cognate DR substrate, and was sensitive to C-terminal tagging. To control for over-expression, data were normalized to negative control conditions (−), in which dCas9 was co-transfected with the reporter. Data are shown as mean±s.d. for n=3 biologically independent samples.

[0021] FIGS. 2A-2G show development of QCascade and TnsC-based transcriptional activators to monitor DNA targeting. FIG. 2A is design of mammalian expression vectors encoding transposon-encoded Type I-F3 systems (VchQCascade). Cascade subunits are concatenated on a single polycistronic vector and connected by virally derived 2A peptides, as described previously. FIG. 2B is normalized mCherry fluorescence levels for the indicated experimental conditions, measured by flow cytometry. Whereas PseCascade stimulated robust activation, VchQCascade was inactive under these conditions. NT, non-targeting sgRNA/crRNA; T, targeting sgRNA/crRNA. FIG. 2C is design of separately encoded VchQCascade mammalian expression vectors with optimized NLS tag placement. FIG. 2D shows VchQCascade mediates transcriptional activation when encoded by re-engineered expression vectors, as measured by flow cytometry. mCherry expression is further enhanced when replacing mono-partite (SV40) NLS tags with bipartite (BP) NLS tags. NT, non-targeting; T, targeting. FIG. 2E is a schematic of transcriptional activation assay, in which DNA targeting by VchQCascade leads to multi-valent recruitment of VchTnsC-VP64. The assembly mechanism is based on recent biochemical, structural, and functional data. FIG. 2F is normalized mCherry fluorescence levels for the indicated experimental conditions, measured by flow cytometry. VchTnsC-based activation utilizes cognate protein-protein interactions, is dependent on the presence of TniQ, and involves ATP-dependent oligomer formation, which is eliminated with the E135A mutation. Several controls are shown for comparison, and guide RNAs target the same sites shown in FIG. 8A. NT, non-targeting crRNA. FIG. 2G shows transcriptional activation has strong sensitivity to RNA-DNA mismatches within both the PAM-proximal seed sequence and a PAM-distal region implicated in TnsC recruitment. Data are shown as in FIG. 2F, and the schematic at top displays the mismatched positions that were tested. Data were normalized to the perfectly matching (PM) crRNA. Data in FIGS. 2B, 2D and 2F-2G are shown as mean±s.d. for n=3 biologically independent samples.

[0022] FIGS. 3A-3E show potent genomic transcriptional activation via RNA-guided recruitment of the AAA+ ATPase, TnsC. FIG. 3A shows TnsC-VP64 directs efficient transcriptional activation of endogenous human gene expression, as measured by RT-qPCR. Four distinct crRNAs were combined for each condition and were either delivered individually, as a pool, or as a single multi-spacer multiplexed CRISPR array. The dCas9-VP64 and dCas9-VPR comparisons utilized four distinct sgRNAs encoded on separate plasmids. NT, non-targeting; T, targeting. FIG. 3B is a schematic demonstrating Cas6′s ability to process CRISPR arrays in vivo, thus allowing for the use of multiplexed CRISPR arrays to target multiple sites concurrently. FIG. 3C shows multiplexed activation of 4 distinct genes in the same cell pool. FIG. 3D is a 10 kb viewing window of ChIP-seq signal at the TTN promoter corresponding to TTN Guide 1. FIG. 3E is a differential binding analysis plot. Across consensus peaks for each condition, the only region exhibiting significantly different ChIP enrichment (FDR<0.05) between targeting and non-targeting conditions was the peak at the TTN promoter. Data in FIGS. 3A and 3C are shown as mean±s.d. for n=3 biologically independent samples. Viewing windows in FIG. 3D, are shown for 3 biologically independent targeting and non-targeting samples, and ChIP-seq signal is visualized as signal per million reads (SPMR). Data in e, is shown as the mean for n=3 biologically independent samples for each condition on the y axis, and the mean for all n=6 biologically independent samples on the x axis, irrespective of condition.

[0023] FIGS. 4A-4I show plasmid-based RNA-guided DNA integration in human cells using diverse CRISPR-associated transposases. FIG. 4A is a schematic of plasmid-to-plasmid transposition assay in human cells. FIG. 4B is Sanger sequencing confirmation of targeted integration products after plasmids isolation from human cells and selected in E. coli (FIG. 4A), showing the expected insertion site position and presence of target-site duplication (SEQ ID NO: 182 and 183, left and right side, respectively. FIG. 4C is a phylogenetic tree of Type I-F3 CRISPR-associated transposon systems, with labels of the homologs that were tested in human cells. FIG. 4D is a comparison of plasmid-to-plasmid integration efficiencies with eCAST-1 (VchCAST) and eCAST-2.1 (PseCAST), as measured by qPCR. Efficiencies are calculated by comparing Cq values between the integration junction product and a reference sequence located elsewhere on pTarget, as described in the Methods. FIG. 4E shows optimization of eCAST-2 (PseCAST) integration efficiencies by varying NLS placement and plasmid stoichiometries, etc., as described in FIG. 12, yielded an approximate 6-fold increase in integration efficiencies. FIG. 4F shows amplicon sequencing reveals a strong preference for integration 49-bp downstream of the 3′ edge of the site targeted by the crRNA in T-RL integrants. FIG. 4G shows deletion experiments confirmed the impact of each protein component, a targeting crRNA, and intact transposase active site (D220N mutation in TnsB, D458N mutation in TnsAB_{f}) for successful integration. FIG. 4H shows RNA-guided DNA integration functions with genetic payloads spanning 1-15 kb in size, transfected based on molar amount. FIG. 4I shows RNA-guided DNA integration has a strong sensitivity to mismatches across the entire 32-bp target site. Data were normalized to the perfectly matching (PM) crRNA, which exhibited an efficiency of 4.7±1.8%. Data in FIGS. 4D, 4E, 4G-4I are shown as mean±s.d. for n=3 biologically independent samples. Data in 4D, 4E, 4G-4I are determined by qPCR.

[0024] FIGS. 5A-5I show ClpX-mediated enhancement of genomic DNA integration with eCAST-3. FIG. 5A is Sanger sequencing (SEQ ID NO: 184) of nested PCR of genomic lysates in which eCAST-2.2 targeted the AAVS1 genome showing a junction product 49 bp downstream of the target site targeted by crRNA12 (AAVS1-1), one of the optimal crRNAs screened in FIG. 15A. FIG. 5B shows initial quantifications of genomic integration efficiencies at AAVS1-1. FIG. 5C shows integration efficiencies across multiple loci within human genome showed broadly limited efficiencies. Quantified integration efficiencies less than 0.0001% were not plotted, and “N.D.” represents a target site in which no integration events were detected across three biological replicates. FIG. 5D is proposed steps to facilitate successful targeted integration, including the downstream gap-repair for complete resolution of the integration product. FIG. 5E shows co-transfection of EcoClpX specifically improves genomic, but not plasmid, integration efficiencies in human cells. FIG. 5F shows co-transfecting EcoClpX at varied amounts directly impacts genomic integration efficiencies in human cells. FIG. 5G shows the impact of various Clp proteins from E. coli on genomic integration efficiencies in human cells. FIG. 5H shows integration efficiencies for samples before and after FACS of a fluorescent transfection marker to select for the top 20% brightest cells. Sorting enriched integration efficiencies, as measured by qPCR, ddPCR, and amplicon sequencing (see FIG. 14B). For amplicon sequencing samples, triangle data points represent all insertions characterized, while circle data points represent only 49-bp insertions. FIG. 5I shows integrations efficiencies investigated across multiple loci within the human genome with and without EcoClpX. Quantified integration efficiencies less than. 0.0001% were not plotted. Data in FIGS. 5B, 5C, 5E, 5G-5I are shown as mean±s.d. for n=3 biologically independent samples. Data in f are shown as mean for n=2 biologically independent samples. Data in FIGS. 5B, 5C, 5E, 5F-5I are quantified by amplicon sequencing.

[0025] FIGS. 6A-6D show improving expression and nuclear localization of VchCAST components. FIG. 6A is western blotting of various VchCAST components using distinct nuclear localization signals (NLS). Each component was appended with a 3× FLAG epitope tag and NLS tag, and nuclear fractionation was performed to separate nuclear and cytoplasmic cellular proteins. Histone deacetylase 1 (HDAC1) and a-Tubulin were used as nuclear- and cytoplasmic-specific loading controls, respectively. Western blots were repeated in biological duplicate with similar results. FIG. 6B is multiple fusion designs of TnsA and TnsB (TnsAB_{f}), with an NLS appended internally or at the N- or C-terminus. FIG. 5C is RNA-guided DNA integration activity determined in E. coli with the indicated TnsAB_{f} variants, as measured by qPCR. Data are shown as a mean±s.d. for n=3 biologically independent replicates. FIG. 5D is western blotting of TnsAB_{f} with internal NLS for validating expression and nuclear localization. The observed band was at the expected size, with no evidence of degradation or internal cleavage. Western blots were repeated in biological duplicate with similar results.

[0026] FIGS. 7A-7F show optimization of VchQCascade expression and transcriptional activation in human cells. FIG. 7A, top, is a schematic of mCherry reporter plasmid for transcriptional activation assays. The location of sites targeted by Cas9 single-guide RNAs (sgRNA) and Cascade CRISPR RNAs (crRNA) are indicated. PAMs are marked with a yellow circle. FIG. 7A, bottom, is a design of mammalian expression vectors encoding Cascade-based transcriptional activators from a Type I-E system (PseCascade), alongside dCas9-VP64 and dCas9-VPR controls. FIG. 7B is a depiction of V. cholerae TniQ-Cascade structure (PDB ID: 6PIF) showing the location of N- and C-termini in blue and red, respectively. All termini are solvent exposed and appear amenable to tagging. FIG. 7C is RNA-guided DNA integration activity in E. coli with the indicated NLS and/or 2A-tagged protein variants, measured by qPCR. Numerous tags have a deleterious effect. Data are normalized to the “WT no tags” condition, which resulted in a mean integration efficiency of 51±8%. FIG. 7D is RNA-guided DNA integration activity in E. coli with combined NLS and transcriptional activator fusions, as measured by qPCR. Fusing a VP64 or VPR transcriptional activator to the N-terminus of Cas7 exhibited the least deleterious effects on integration activity. Data are normalized to the “WT” condition, which resulted in a mean integration efficiency of 76.4%±4%. FIG. 7E is strength of transcriptional activation across a set of distinct crRNAs (“cr #”) targeting the mCherry reporter plasmid, as well as various activator-NLS constructs. Activation was measured using the reporter shown in FIG. 7A and measured by flow cytometry. S.V. indicates single vector design. Pc indicates polycistronic design of expression vectors as shown in FIG. 7A. FIG. 7D shows transcriptional activation by VchQCascade utilizing a VP64-Cas7 fusion construct is dependent on the presence of all Cascade components, as seen from the indicated dropout panel, but proceeds with ˜50% activity in the absence of TniQ. Data in FIGS. 7C-7F are shown as mean±s.d. for n=3 biologically independent samples.

[0027] FIGS. 8A-8E show optimization of TnsC-mediated transcriptional activation in human cells. FIG. 8A shows normalized mCherry fluorescence levels for the indicated experimental conditions, as measured by flow cytometry. VP64 was appended to TnsC at either the N- or C-terminus (VP64-TnsC or TnsC-VP64, respectively), and crRNAs (“cr #”) were cloned to target various sites upstream of the mCherry gene (top). mCherry fluorescence levels were measured by flow cytometry and normalized to the non-targeting gRNA condition (bottom). FIG. 8B shows transcriptional activation is affected by titrating the relative levels of each expression plasmid, with numbers below the graph indicating the fold-change of each plasmid amount relative to the initial stoichiometric condition with a targeting crRNA (second bar from left). mCherry fluorescence levels were measured by flow cytometry. FIG. 8C is a schematic showing the position of crRNAs (“cr #”) or sgRNAs (sg #) targeting each genomic locus for TnsC-mediated transcriptional activation for VchCAST (maroon) and dCas9 TTN activation (green). FIG. 8D is a representative schematic of multispacer crRNAs used during TnsC-mediated genomic transcriptional activation. For TTN, MIAT, and ASCL1, the 4 individual spacer sequences used in individual or pooled crRNA conditions were expressed as one multispacer CRISPR array. The CRISPR array is processed by Cas6 after transfection into cells and enables programmable targeting of multiple copies of QCascade and TnsC to a target locus. FIG. 8E is genomic transcriptional activation at the ACTC1 locus as quantified by RT-qPCR. 3 distinct crRNAs or gRNAs were used for each condition. Data in FIGS. 8A and 8B are shown as mean for n=2 biologically independent samples. Data in FIG. 8E, are shown as the mean±s.d. for n=3 biologically independent samples.

[0028] FIGS. 9A-9G show detection of TnsC recruitment to a genomic locus and profiling of off-target binding events. FIG. 9A is a 500 kb viewing window of ChIP-seq signal at the TTN promoter targeted by TTN Guide 1. FIG. 9B, top, is a 5 kb viewing window of ChIP-seq peak at the TTN promoter targeted by TTN Guide 1. FIG. 9B, bottom, 150 bp viewing window ChIP-seq peak at the TTN promoter targeted by TTN Guide 1. The peak summits in the targeting conditions align with the TTN promoter protospacer. FIG. 9C is a Venn diagram showing overlap of targeting and non-targeting peaks. FIG. 9D is a heatmap of signal intensity in a 2 kb window surrounding the peak center in TTN targeting exclusive peaks (1203), sorted in descending order by mean signal over the window. The peak with the highest mean signal was at the TTN promoter, which was targeted by TTN Guide 1. FIG. 9E is a heatmap of signal intensity in a 2 kb window surrounding the peak center in non-targeting (NT) exclusive peaks (2526), sorted in descending order by mean signal over the window. ChIP-seq signal was weak across NT exclusive peaks. FIG. 9F is a list of 5 genomic loci most similar to the TTN protospacer (SEQ ID NOs: 185-190, top to bottom). Mismatches at every 6th nucleotide, denoted by an “X”, were disregarded due to the nature with which Cas7 binds to crRNAs. All other mismatches are shown in red. FIG. 9G shows manual inspection of a 10 kb window surrounding each predicted off-target sequence. Minimal enrichment of ChIP-seq signal was seen in either the TTN targeting or the non-targeting condition. Viewing windows in FIGS. 9A, 9B, and 9G are shown for 3 biologically independent targeting and non-targeting samples, and ChIP-seq signal is visualized as signal per million reads (SPMR). Triangles in FIGS. 9A and 9G denote the position of either the expected TTN targeting sequence or of the predicted mismatch sequences.

[0029] FIGS. 10A-10E show detection and optimization of targeted integration using VchCAST (eCAST-1). FIG. 10A shows quantification of ChlorR resistant E. coli colonies after isolation from human cells. FIG. 10B is representative colony PCR of clonal integration products, detecting right transposon end (TnR) and left transposon end (TnL) junctions, as well as the KanR marker on the backbone of pTarget. Sanger sequencing of integration junctions are shown in FIG. 4B. This was repeated in biological duplicate with similar results. FIG. 10C is a nested PCR strategy to detect plasmid-transposon junctions directly from HEK293T cell lysates (left), and agarose gel electrophoresis showing target-cargo junction product bands (right). Expected amplicon sizes are marked for each PCR reaction with red arrows, and the crRNA was either non-targeting (NT) or targeting (T). “H₂O” denotes a condition in which the lysate was omitted from the PCR reactions. An aliquot of PCR-1 is used for PCR-2 such that a “nested PCR” is performed (see Methods). Sanger sequencing was performed on the product after PCR-2 in the targeting condition (SEQ ID NO: 191; bottom right). This was repeated in biological triplicate with similar results. FIG. 10D is a schematic of TaqMan probe strategy used to improve signal-to-noise by selectively detecting novel plasmid-transposon junctions. Probes labeled with FAM (blue) are used to detect target-transposon junctions, and probes labeled with SUN (green) are used to detect the target plasmid backbone (reference sequence), for integration efficiency quantification. Probes that span the junction of pTarget and the right transposon end of eCAST-1 are designed to anneal to an insertion event 49-bp downstream of the target site. FIG. 10E shows integration efficiencies were improved by varying the relative levels of pDonor, pTarget, or protein expression plasmids, as indicated; data were normalized to a control sample transfected with 100 ng of each component (left), or to the 100 ng condition for each varied protein (right), which had an average value of either 0.004% (left) or ranged from 0.0002-0.0005% (right), respectively. Data in e are shown as mean for n=2 biologically independent samples. Data shown in FIG. 10E were quantified via qPCR.

[0030] FIG. 11A-11E show systematic screening of homologous Type I-F CRISPR-associated transposons to uncover improved systems for mammalian cell applications. FIG. 11A is a cartoon depicting the multi-tiered approach that was applied to screen the indicated systems through a series of consecutive activity assays, with associated schematics shown for each functional assay. The middle panel depicts a transcriptional activation assay designed to monitor transposon DNA binding by TnsB in human cells using a tdTomato reporter plasmid. FIG. 11B is western blotting to detect expression of candidate Cas6 homologs in HEK293T cells, with or without human codon optimization (hCO), using monoclonal anti-FLAG M2 antibody; β-actin was used as a loading control. A range of expression levels were observed for human codon-optimized gene variants, and genes were poorly expressed for most systems when native bacterial coding sequences were used. FIG. 11C is activity assays for Cas6 homologs using the GFP knockdown assay shown in FIG. 1D. For each homolog, GFP fluorescence levels were measured by flow cytometry and normalized to the experimental condition in which the GFP reporter plasmid lacked a CRISPR direct repeat (DR) in the 5′-UTR. FIG. 11D is transcriptional activation data for TnsB-VP64 constructs from selected homologous CAST systems, as measured by flow cytometry. FIG. 11E is transcriptional activation data for QCascade and TnsC-VP64 from homologous CAST systems, as measured by flow cytometry. Tn7016, the final homolog that was selected for additional screening for transposition, is marked with a red arrow. Data in FIGS. 11C-11E are shown as mean for n=2 biologically independent samples.

[0031] FIGS. 12A-12I show parameter screening to further improve integration activity with the eCAST-2 (PseCAST) system. FIG. 12A is RNA-guided DNA integration efficiency for TnsAB fusion (TnsAB_{f}) protein design, with or without internal NLS, compared to the wild-type TnsA and TnsB proteins. Experiments were performed in E. coli, and efficiencies were measured by qPCR. FIG. 12B shows Tn7016 transposon ends were shortened relative to the constructs tested previously, generating the constructs indicated with red dashed boxes at the top. RNA-guided DNA integration activity was compared for the indicated transposon right end (RE) variants in E. coli, as measured by qPCR (bottom), while a 145 bp LE was used. The final pDonor design used in FIG. 4 contains 145-bp and 75-bp derived from the native left and right ends of Pseudoalteromonas Tn7016, respectively. FIG. 12C is agarose gel electrophoresis showing successful junction products from nested PCR (top) for eCAST-2, and Sanger sequencing chromatograms showing the expected integration distance (SEQ ID NO: 192; bottom). FIG. 12D shows integration efficiencies in HEK293T cells were similar using either typical or atypical CRISPR repeats, as measured by qPCR. FIG. 12E shows RNA-guided DNA integration activity compared with the indicated BP NLS tags on eCAST-2 components, as measured by qPCR. Individual components had their respective BP NLS tag repositioned from the N- to the C-terminus; “All” represents a condition in which all components had BP NLS tags on the noted terminus (left). Interestingly, the observed tag sensitivity is similar to, but distinct from, that with eCAST-1 components. Various combinations of N- and C-terminal NLS tagging for PseQCascade and PseTnsC (right). NT=non-targeting crRNA. FIG. 12F shows nuclear export signal (NES) predictions for eCAST-2 wild type (WT) and mutant TnsC (Mut). Predicted NES sequences were generated using NetNES (WT=SEQ ID NO: 193; Mut=SEQ ID NO: 194). FIG. 12G shows RNA-guided DNA integration activity was compared after appending additional NLS tags on PseTnsC and removing a potential internal nuclear export signal (NES) sequence with the mutations L255A, L258V, and L260V, as indicated in FIG. 12F. FIG. 12H shows RNA-guided DNA integration activity compared after varying the relative levels of individual eCAST-2 protein and RNA expression plasmids. Data were measured by qPCR and were normalized to either the sample transfected with 100 ng of each component for each condition, with an average integration efficiency of 0.10-0.17% (left), or a control sample (labeled T) transfected with the standard eCAST-2 plasmid amounts, as detailed in the Methods section with an average integration efficiency of 2.7% (right). FIG. 12I is a plasmid-based BxbI recombination assay performed to benchmark eCAST-2 integration efficiency to other commonly used large DNA insertion tools. Data in FIGS. 12A, 12B, 12D, and 12I are shown as the mean±s.d. for n=3 biologically independent samples. Data in FIGS. 12E, 12G, and 12H are shown as the mean for n=2 biologically independent samples.

[0032] FIGS. 13A-13E show selection, seeding, and sorting strategies result in further increases in eCAST-2.2 integration efficiencies. FIG. 13A is normalized RNA-guided DNA integration efficiency for eCAST-2.2 in the absence or presence of puromycin selection, and after harvesting cells from between 2-6 days post-transfection. Experiments used a puromycin resistance plasmid as a transfection selection marker, in addition to eCAST-2.2 component plasmids, and integration activity was measured by qPCR and normalized to the condition harvested on day 3 without puromycin selection, which had an average integration efficiency of 2.3%. FIG. 13B shows eCAST-2.2 integration efficiencies as a function of seeding density 24 hours before transfection. 24-well plates were with various cell densities ranging from 1×10³ to 2×10⁵ cells per well, and integration activity was measured by qPCR. FIG. 13C shows transfection of HEK293T cells via various cationic lipid delivery methods affected integration efficiencies. FIG. 13D is a schematic showing the use of a GFP transfection marker and cell sorting to increase integration efficiency. A GFP expression plasmid was transfected in significantly smaller amounts relative to eCAST-2.2 component plasmids, and cells were sorted into bins of varying GFP expression levels. FIG. 13E shows eCAST-2.2 integration efficiencies are enhanced after using flow cytometry to sort cells for the brightest GFP positive cells. Cells were sorted four days after transfection, and the top 20% brightest cells were binned in increments of 5%, with Bin 1 representing the top 5% brightest cells and Bin 4 representing the 15-20% brightest cells. Integration efficiencies were determined for each bin separately, or for the unsorted population, as measured by qPCR. Integration efficiencies were normalized to the unsorted, targeting crRNA condition, which had a value of 0.44%. Data in FIG. 13A are shown as the mean of n=2 biologically independent samples. Data in FIGS. 13B, 13C, and 13E are shown as the mean±s.d. for n=3 biologically independent samples.

[0033] FIGS. 14A-14D show eCAST-2.2 integration is biased towards T-RL insertion and reproducibly quantified across distinct approaches. FIG. 14A shows RNA-guided DNA integration is heavily biased towards insertion in the right-left (T-RL) orientation, with only a small minority of insertion events occurring in the left-right (T-LR) orientation. Integration efficiencies were calculated using SYBR qPCR. Triangle data points represent integration events in the T-LR orientation, while circle data points represent integration events in the T-RL orientation. FIG. 14B is a comparison of different strategies to detect and quantify integration efficiencies. For next-generation amplicon sequencing, a variant pDonor was constructed in which a primer binding site that is also present at the target site is cloned within the transposon cargo at a distance from the transposon right end (R), such that unedited sites and integration products yield amplicons of indistinguishable length using pF and pR primers (top). Consequently, next-generation sequencing of these amplicons provides relative abundances of edited and unedited alleles in the population, allowing for higher sensitivity in detecting integration efficiencies. For qPCR and ddPCR detection strategies, Taqman probes and primers are designed to amplify either the integration product or a reference sequence used to calculate integration efficiencies (bottom). For plasmid-based integration assays, the reference sequence is a distinct sequence on the plasmid target (pTarget). FIG. 14C is representative agarose gel electrophoresis demonstrating identical amplicon products for non-targeting (NT) and targeting (T) samples after PCR-1 for NGS analysis. This was repeated in biological triplicates with similar results. FIG. 14D is calculated integration efficiencies for the same experimental samples, measured by TaqMan qPCR, droplet digital PCR (ddPCR), and amplicon deep sequencing. ddPCR and qPCR analyses specifically probe for integration products that are 49-bp downstream of the target site, whereas amplicon sequencing analysis does not impose the same stringent distance bias, allowing the quantification of integration products within a larger window surrounding the anticipated integration site. Editing efficiencies for both eCAST-2.2 and eCAST-1 were consistent between different quantification methods. For amplicon sequencing samples, triangle data points represent all insertions characterized, while circle data points represent only 49-bp insertions. Data in FIG. 14A, are shown as the mean±s.d. for n=3 biologically independent samples. Data in FIG. 14C are shown as the mean for n=2 biologically independent samples.

[0034] FIGS. 15A-15F show possible improvements to eCAST-2.2 genomic integration activity and identification of kinetic bottlenecks. FIG. 15A shows a unique target site was cloned into a modified pTarget, in which the downstream integration site sequence remained the same, allowing investigation of the impact of different crRNA sequences on integration efficiencies (left). Cloning various target sites into the modified pTarget that correspond to target sites within the AAVS1 safe harbor locus enabled screening of crRNAs to identify active sequences (right). Efficiencies were normalized to the crRNA used in plasmid-targeting assays, which had an average integration efficiency of 2.0%. FIG. 15B shows simplification of transfection workflow via polycistronic expression of QCascade, and genomic integration efficiencies with different constructs. “Separate Vectors” represents a condition in which TniQ, Cas8, Cas7, and Cas6 were all expressed from separate pcDNA3.1-like vectors. FIG. 15C shows the impact of additional NLS tags on eCAST-2 QCascade components on genomic integration efficiencies. All QCascade components had a singular NLS tag, unless noted. FIG. 15D shows the impact of stably-expressed eCAST-2 components on genomic integration efficiencies. Cell lines were generated via Sleeping Beauty with drug selection, and various components were stably expressed (indicated by operons shown on the y-axis). “All components transfected” represents conditions in which all eCAST-2 components were co-transfected, while “Remaining components transfected” represents conditions in which only the non-expressed eCAST-2 components were transfected. FIG. 15E shows the impact of co-transfection of E. coli Integration Host Factor (IHF) on human genomic integration efficiencies. “T+scIHF” represents a condition in which a plasmid expressing a single-chain IHFa/b was co-transfected with a targeting gRNA. FIG. 15F shows varying cell harvest day and selection of transfected cells based on a concurrent drug marker improves integration efficiencies, although overall efficiencies remain low. Data in FIGS. 15A-15E are shown as mean for n=2 biologically independent samples. Data in FIG. 15G are shown as the mean±s.d. for n=3 biologically independent samples. Data in FIG. 15A was determined by qPCR. Data in FIGS. 15B-15F were determined by amplicon sequencing.

[0035] FIGS. 16A-16D show genomic editing outcomes with ClpX. FIG. 16A shows mutational analysis of ClpX-mediated editing improvements. Point mutations were designed to either ablate ATP hydrolysis (E185Q and R370K) or perturb substrate engagement (Y153A and V154F). FIG. 16B shows the impact of native ClpX proteins on eCAST-2 and eCAST-1. PseClpX and VchClpX improved eCAST-2 and eCAST-1 genomic integration efficiencies, respectively, but EcoClpX consistently produces a more robust improvement. FIG. 16C shows human-derived ClpX does not improve genomic integration efficiencies for eCAST-2. The putative mitochondrial targeting sequence from human derived ClpX was replaced with a BP-NLS tag. FIG. 16D shows the proposed model for the role of ClpX in improving genomic integration efficiencies. In the absence of ClpX, the PTC is sufficiently stable to prevent accessibility to the DNA intermediate, leading to a loss of genomic integration events. In contrast, inclusion of ClpX facilitates unfolding of CAST components, resulting in destabilization/dissociation of the complex and accessibility to the DNA intermediate. Data in FIGS. 16A-16C are shown as the mean±s.d. for n=3 biologically independent samples.

[0036] FIGS. 17A-17G show engineering CAST systems with ClpX. FIG. 17A shows the impact of atypical spacer lengths on plasmid-based integration efficiencies (the canonical spacer length, 32nt, is marked with a maroon triangle). FIG. 17B shows the impact of 32nt vs 33nt spacer lengths on genomic integration efficiencies at the AAVS1-1 target site. Two different crRNAs were tested that were nearby in the genomic locus, minimizing disruption of potential downstream integration-site requirements. FIG. 17C shows the impact of encoding the crRNA on the pDonor for genomic integration efficiencies. The U6 promoter, crRNA, and U6 terminator sequences were cloned on either a separate plasmid or in the pDonor backbone. FIG. 17D shows genomic integration as a function of different cationic lipid transfection methods FIG. 17E is a comparison of integration efficiencies in the presence and absence of ClpX as measured by qPCR, ddPCR, and amplicon sequencing for AAVS1-1; ddPCR and amplicon sequencing for OXA1L-2. For amplicon sequencing samples, triangle data points represent all insertions characterized, while circle data points represent only 49-bp insertions. FIG. 17F shows varying cell harvest day and selection of transfected cells based on a concurrent drug marker improves integration efficiencies, in the presence of ClpX. FIG. 17G is a schematic of sequences that were analyzed to understand if undesirable editing outcomes were occurring with eCAST-3. If a sequence did not contain a transposon end, the sequence surrounding the intended integration site was investigated for a higher frequency of indel events compared to samples in which a non-targeting crRNA was used. If a transposon end was detected in the sequence, the sequence was analyzed for additional mutations. Lower left shows mutations surrounding the integration region at AAVS1-1 do not occur above background frequencies present when a NT crRNA is co-transfected. Right hand side shows mutations upstream the integration site at AAVS1-1 do not occur at a higher rate compared to WT alleles (top). Mutations in the transposon end and surrounding the target site duplication at AAVS1-1 do not occur at rates above background sequencing error (bottom). Integration events at the major integration site (49 bp downstream of crRNA) were analyzed. Data in FIGS. 17A-17C and 17E (for AAVS1-1) are shown as mean for n=2 biologically independent samples. Data in FIGS. 17D, 17E (for OXA1L-2), 17F, and 17G are shown as mean±s.d. for n=3 biologically independent samples. Data were quantified by amplicon sequencing.

[0037] FIGS. 18A and 18B show leveraging eCAST-3 to perform targeted RNA-guided DNA integration at multiple target sites. FIG. 18A shows an exemplary workflow for applying eCAST-3 to new target sites. First, potential targets with CC PAMs are identified in region of interest. Target sites are then screened for optimal primers for amplicon sequencing. The downstream primer binding site is cloned into a pDonor immediately adjacent to the RE, enabling NGS-based quantification. Cells are then transfected with pCRISPR, pQCascade, pTnsAB, pTnsC, pClpX, pDonor, and an optional drug selection marker. After 4 days, cells can be harvested for PCR prep and subsequent NGS-based analysis. FIG. 18B is representative integration site distributions for transfections shown in FIG. 5I. The length of the spacer is shown, and the distance represents the length from the PAM-distal end of the spacer to the transposon end.

[0038] FIGS. 19A and 19B show PseCAST integration efficiencies with extra-chromosomal and chromosomal DNA substrates. FIG. 19A shows integration efficiencies of PseCAST when the target DNA substrate is varied. When the crRNA targets a DNA sequence that is encoded within the genome, integration efficiencies drop approximately two to three orders of magnitude efficiencies between plasmid and genomic substrates. Genomic-based integration transfections targeted the AAVS1 safe harbor locus within intron 1 of the PPP1R12C gene. FIG. 19B is a schematic of potential rate-limiting steps that uniquely impact episomal and genomic integration assays. Notably, episomal DNA does not need to undergo DNA replication, and thus dissociation and gap repair of the post-transposition complex is optional. Genomic DNA undergoes replication, thus an unresolved post-transposition complex may result in toxicity or activation of complex DNA repair pathways.

[0039] FIG. 20 is a schematic of CAST-based integration events resulting in DNA intermediates requiring host proteins for complete resolution. Transposase machineries mediate excision of transposon from donor plasmid and insertion into target site, resulting in a gapped intermediate containing 5′ DNA overhangs. In order for complete gap repair and resolution of the transposition event, transposase proteins must dissociate from the target site to allow host repair factors to access and repair intermediate substrates.

[0040] FIG. 21 is a graph of titrations of ClpX expression plasmid showing a dose-dependent correlation of genomic integration efficiencies in the presence of ClpX. As the amounts of a pcDNA3.1 plasmid expressing E. coli derived ClpX is increased, genomic integration efficiencies increase. At 100 ng of ClpX plasmid transfected, improvements in integration efficiencies are saturated. Density of cells transfected approximately 24 hours prior to transfection has little effect on overall integration efficiencies in the presence of ClpX. Genomic-based integration transfections targeted the AAVS1 safe harbor locus within intron 1 of the PPP1R12C gene.

[0041] FIG. 22 shows ClpX improves genomic integration efficiencies at multiple target sites across the genome through integration assays with PseCAST machinery with and without ClpX. Each transfection contained a crRNA expression plasmid targeting a unique site across the human genome.

[0042] FIG. 23 shows that ClpX does not improve other genomic editing methods. Cas9-mediated genome editing was performed with and without ClpX in human cells, and the frequency of indels were quantified. The region surrounding the sequence targeted by gRNA was PCR-amplified and analyzed via next-generation sequencing and CRISPResso2 (Clement, Nat Biotechnol 37, (2019)). Genomic-based editing transfections targeted the AAVS1 safe harbor locus within intron 1 of the PPP1R12C gene.

[0043] FIG. 24 shows the characterization of functional residues within the C-terminus of TnsB. Serial truncations of TnsB show immediate ablation of plasmid-based integration efficiencies. Pleitropic residues may reside in the C-terminus of TnsB, interacting with both TnsC and ClpX at different stages of the CAST integration pathway.

### DETAILED DESCRIPTION

[0044] The disclosed systems, kits, and methods provide systems and methods for nucleic acid integration utilizing engineered CRISPR-associated transposon systems. The disclosed systems, kits, and methods provide systems and methods for RNA-guided DNA integration utilizing engineered CRISPR-associated transposon systems.

[0045] Tn7-like and Tn5053-like transposons that encode nuclease-deficient CRISPR-Cas systems, also known as CRISPR-transposons (CRISPR-Tn) and CRISPR-associated transposons (CAST), catalyze the Insertion of Transposable Elements by Guide RNA-Assisted TargEting (sometimes referred to as INTEGRATE, or INTEGRATE technology). Here CAST activity is shown using two diverse systems from V. cholerae and Pseudoalteromonas, demonstrating that the same molecular determinants of RNA-guided transposition hold true in bacteria and eukaryotes. Also, a strategy for targeted recruitment of an oligomeric transposase component, TnsC for use in transcriptional activation at levels similar to conventional dCas9-based reagents was developed. Further, RNA-guided DNA integration is simulated in mammalian cells using an unfoldase protein (e.g., ClpX). The ATP-dependent Clp protease ATP-binding subunit ClpX, hereafter referred to as ClpX, together with obligate protein RNA components catalyze site-specific, RNA-guided insertion of mini-transposon DNA payloads into genomic target sites, leading to an enhancement of the observed integration efficiencies by one or more orders of magnitude across multiple tested target sites. Given the roles of ClpX in mechanically unfolding post-integration strand-transfer complexes, also known as transpososomes, ClpX may find utility in the disclosed systems and method for the removal of CAST machinery from genomic target sites after the integration reaction, thereby rendering those sites accessible to DNA repair machinery for gap fill-in and DNA ligation.

[0046] Section headings as used in this section and the entire disclosure herein are merely for organizational purposes and are not intended to be limiting.

### Definitions

[0047] The terms “comprise(s),” “include(s),” “having,” “has,” “can,” “contain(s),” and variants thereof, as used herein, are intended to be open-ended transitional phrases, terms, or words that do not preclude the possibility of additional acts or structures. As used herein, comprising a certain sequence or a certain SEQ ID NO usually implies that at least one copy of said sequence is present in recited peptide or polynucleotide. However, two or more copies are also contemplated. The singular forms “a,” “and” and “the” include plural references unless the context clearly dictates otherwise. The present disclosure also contemplates other embodiments “comprising,” “consisting of,” and “consisting essentially of,” the embodiments or elements presented herein, whether explicitly set forth or not.

[0048] For the recitation of numeric ranges herein, each intervening number there between with the same degree of precision is explicitly contemplated. For example, for the range of 6-9, the numbers 7 and 8 are contemplated in addition to 6 and 9, and for the range 6.0-7.0, the number 6.0, 6.1, 6.2, 6.3, 6.4, 6.5, 6.6, 6.7, 6.8, 6.9, and 7.0 are explicitly contemplated.

[0049] Unless otherwise defined herein, scientific, and technical terms used in connection with the present disclosure shall have the meanings that are commonly understood by those of ordinary skill in the art. For example, any nomenclature used in connection with, and techniques of cell and tissue culture, molecular biology, genetics and protein and nucleic acid chemistry and hybridization described herein are those that are well known and commonly used in the art. The meaning and scope of the terms should be clear; in the event, however of any latent ambiguity, definitions provided herein take precedent over any dictionary or extrinsic definition. Further, unless otherwise required by context, singular terms shall include pluralities and plural terms shall include the singular.

[0050] As used herein, “nucleic acid” or “nucleic acid sequence” refers to a polymer or oligomer of pyrimidine and/or purine bases, preferably cytosine, thymine, and uracil, and adenine and guanine, respectively (See Albert L. Lehninger, Principles of Biochemistry, at 793-800 (Worth Pub. 1982)). The present technology contemplates any deoxyribonucleotide, ribonucleotide, or peptide nucleic acid component, and any chemical variants thereof, such as methylated, hydroxymethylated, or glycosylated forms of these bases, and the like. The polymers or oligomers may be heterogenous or homogenous in composition and may be isolated from naturally occurring sources or may be artificially or synthetically produced. In addition, the nucleic acids may be DNA or RNA, or a mixture thereof, and may exist permanently or transitionally in single-stranded or double-stranded form, including homoduplex, heteroduplex, and hybrid states. In some embodiments, a nucleic acid or nucleic acid sequence comprises other kinds of nucleic acid structures such as, for instance, a DNA/RNA helix, peptide nucleic acid (PNA), morpholino nucleic acid (see, e.g., Braasch and Corey, Biochemistry, 41(14): 4503-4510 (2002)) and U.S. Pat. No. 5,034,506), locked nucleic acid (LNA; see Wahlestedt et al., Proc. Natl. Acad. Sci. U.S.A., 97: 5633-5638 (2000)), cyclohexenyl nucleic acids (see Wang, J. Am. Chem. Soc., 122: 8595-8602 (2000)), and/or a ribozyme. Hence, the term “nucleic acid” or “nucleic acid sequence” may also encompass a chain comprising non-natural nucleotides, modified nucleotides, and/or non-nucleotide building blocks that can exhibit the same function as natural nucleotides (e.g., “nucleotide analogs”); further, the term “nucleic acid sequence” as used herein refers to an oligonucleotide, nucleotide or polynucleotide, and fragments or portions thereof, and to DNA or RNA of genomic or synthetic origin, which may be single or double-stranded, and represent the sense or antisense strand. The terms “nucleic acid,” “polynucleotide,” “nucleotide sequence,” and “oligonucleotide” are used interchangeably. They refer to a polymeric form of nucleotides of any length, either deoxyribonucleotides or ribonucleotides, or analogs thereof.

[0051] Nucleic acid or amino acid sequence “identity,” as described herein, can be determined by comparing a nucleic acid or amino acid sequence of interest to a reference nucleic acid or amino acid sequence. A number of mathematical algorithms for obtaining the optimal alignment and calculating identity between two or more sequences are known and incorporated into a number of available software programs. Examples of such programs include CLUSTAL-W, T-Coffee, and ALIGN (for alignment of nucleic acid and amino acid sequences), BLAST programs (e.g., BLAST 2.1, BL2SEQ, and later versions thereof) and FASTA programs (e.g., FASTA3x, FAS™, and SSEARCH) (for sequence alignment and sequence similarity searches). Sequence alignment algorithms also are disclosed in, for example, Altschul et al., J. Molecular Biol., 215(3): 403-410 (1990), Beigert et al., Proc. Natl. Acad. Sci. USA, 106(10): 3770-3775 (2009), Durbin et al., eds., Biological Sequence Analysis: Probabilistic Models of Proteins and Nucleic Acids, Cambridge University Press, Cambridge, UK (2009), Soding, Bioinformatics, 21(7): 951-960 (2005), Altschul et al., Nucleic Acids Res., 25(17): 3389-3402 (1997), and Gusfield, Algorithms on Strings, Trees and Sequences, Cambridge University Press, Cambridge UK (1997)).

[0052] The term “homology” and “homologous” refers to a degree of identity. There may be partial homology or complete homology. A partially homologous sequence is one that is less than 100% identical to another sequence.

[0053] As used herein, the term “hybridization” is used in reference to the pairing of complementary nucleic acids. Hybridization and the strength of hybridization (e.g., the strength of the association between the nucleic acids) is influenced by such factors as the degree of complementary between the nucleic acids, stringency of the conditions involved, and the Tₘ of the formed hybrid. Hybridization methods involve the annealing of one nucleic acid to another, complementary nucleic acid, e.g., a nucleic acid having a complementary nucleotide sequence. The ability of two polymers of nucleic acid containing complementary sequences to find each other and “anneal” or “hybridize” through base pairing interaction is a well-recognized phenomenon. The initial observations of the “hybridization” process by Marmur and Lane, Proc. Natl. Acad. Sci. USA, 46: 453 (1960) and Doty et al., Proc. Natl. Acad. Sci. USA, 46: 461 (1960), have been followed by the refinement of this process into an essential tool of modern biology. For example, hybridization and washing conditions are now well known and exemplified in Sambrook et al., supra. The conditions of temperature and ionic strength determine the “stringency” of the hybridization.

[0054] As used herein, a “double-stranded nucleic acid” may be a portion of a nucleic acid, a region of a longer nucleic acid, or an entire nucleic acid. A “double-stranded nucleic acid” may be, e.g., without limitation, a double-stranded DNA, a double-stranded RNA, a double-stranded DNA/RNA hybrid, etc. A single-stranded nucleic acid having secondary structure (e.g., base-paired secondary structure) and/or higher order structure (e.g., a stem-loop structure) may also be considered a “double-stranded nucleic acid.” For example, triplex structures are considered to be “double-stranded.” In some embodiments, any base-paired nucleic acid is a “double-stranded nucleic acid.”

[0055] The term “gene” refers to a DNA sequence that comprises control and coding sequences necessary for the production of an RNA having a non-coding function (e.g., a ribosomal or transfer RNA), a polypeptide, or a precursor of any of the foregoing. The RNA or polypeptide can be encoded by a full length coding sequence or by any portion of the coding sequence so long as the desired activity or function is retained. Thus, a “gene” refers to a DNA or RNA, or portion thereof, that encodes a polypeptide or an RNA chain that has functional role to play in an organism. For the purpose of this disclosure, it may be considered that genes include regions that regulate the production of the gene product, whether or not such regulatory sequences are adjacent to coding and/or transcribed sequences. Accordingly, a gene includes, but is not necessarily limited to, promoter sequences, terminators, translational regulatory sequences such as ribosome binding sites and internal ribosome entry sites, enhancers, silencers, insulators, boundary elements, replication origins, matrix attachment sites, and locus control regions.

[0056] The terms “non-naturally occurring,” “engineered,” and “synthetic” are used interchangeably and indicate the involvement of the hand of man. The terms, when referring to nucleic acid molecules or polypeptides mean that the nucleic acid molecule or the polypeptide is at least substantially free from at least one other component with which they are naturally associated in nature and as found in nature.

[0057] A “vector” or “expression vector” is a replicon, such as plasmid, phage, virus, or cosmid, to which another DNA segment, e.g., an “insert,” may be attached or incorporated so as to bring about the replication of the attached segment in a cell.

[0058] A cell has been “genetically modified,” “transformed,” or “transfected” by exogenous DNA, e.g., a recombinant expression vector, when such DNA has been introduced inside the cell. The presence of the exogenous DNA results in permanent or transient genetic change. The transforming DNA may or may not be integrated (covalently linked) into the genome of the cell. For example, the transforming DNA may be maintained on an episomal element such as a plasmid. With respect to eukaryotic cells, a stably transformed cell is one in which the transforming DNA has become integrated into a chromosome so that it is inherited by daughter cells through chromosome replication. This stability is demonstrated by the ability of the eukaryotic cell to establish cell lines or clones that comprise a population of daughter cells containing the transforming DNA. A “clone” is a population of cells derived from a single cell or common ancestor by mitosis. A “cell line” is a clone of a primary cell that is capable of stable growth in vitro for many generations.

[0059] A “subject” or “patient” may be human or non-human and may include, for example, animal strains or species used as “model systems” for research purposes, such a mouse model as described herein. Likewise, patient may include either adults or juveniles (e.g., children). Moreover, patient may mean any living organism, preferably a mammal (e.g., human or non-human) that may benefit from the administration of compositions contemplated herein. Examples of mammals include, but are not limited to, any member of the Mammalian class: humans, non-human primates such as chimpanzees, and other apes and monkey species; farm animals such as cattle, horses, sheep, goats, swine; domestic animals such as rabbits, dogs, and cats; laboratory animals including rodents, such as rats, mice and guinea pigs, and the like. Examples of non-mammals include, but are not limited to, birds, fish, and the like. In one embodiment of the methods and compositions provided herein, the mammal is a human.

[0060] The term “contacting” as used herein refers to bring or put in contact, to be in or come into contact. The term “contact” as used herein refers to a state or condition of touching or of immediate or local proximity. Contacting a composition to a target destination, such as, but not limited to, an organ, tissue, cell, or tumor, may occur by any means of administration known to the skilled artisan.

[0061] As used herein, the terms “providing,” “administering,” and “introducing,” are used interchangeably herein and refer to the placement of the systems of the disclosure into a cell, organism, or subject by a method or route which results in at least partial localization of the system to a desired site. The systems can be administered by any appropriate route which results in delivery to a desired location in the cell, organism, or subject.

[0062] Preferred methods and materials are described below, although methods and materials similar or equivalent to those described herein can be used in practice or testing of the present disclosure. All publications, patent applications, patents and other references mentioned herein are incorporated by reference in their entirety. The materials, methods, and examples disclosed herein are illustrative only and not intended to be limiting.

### Systems

[0063] Disclosed herein are systems or kits for DNA modification comprising: a) an engineered Clustered Regularly Interspaced Short Palindromic Repeats (CRISPR)-CRISPR associated (Cas) transposon (CAST) system or one or more nucleic acids encoding the engineered CAST system, wherein the CAST system comprises at least one or all of: i) at least one Cas protein; ii) at least one transposon-associated protein; and iii) a guide RNA (gRNA) complementary to at least a portion of a target nucleic acid sequence; and, optionally, b) at least one unfoldase protein, or a nucleic acid encoding thereof. In some embodiments, one or more of the at least one Cas protein are part of a ribonucleoprotein complex with the gRNA.

[0064] The system may be a cell free system. Also disclosed is a cell comprising the system described herein. In some embodiments, the cell is a prokaryotic cell. In some embodiments, the cell is a eukaryotic cell. In some embodiments, the cell is a mammalian cell (e.g., a cell of a non-human primate or a human cell). Thus, in some embodiments, disclosed herein are systems or kits for DNA integration into a target nucleic acid sequence in a eukaryotic cell (e.g., a mammalian cell, a human cell).

a. CAST System

[0065] CRISPR-Cas systems are currently grouped into two classes (1-2), six types (I-VI) and dozens of subtypes, depending on the signature and accessory genes that accompany the CRISPR array. The engineered CAST system may be derived from a Class 1 CRISPR-Cas system or a Class 2 CRISPR-Cas system.

[0066] Type I CRISPR-Cas systems encode a multi-subunit protein-RNA complex called Cascade, which utilizes a crRNA (or guide RNA) to target double-stranded DNA during an immune response. Cascade itself has no nuclease activity, and degradation of targeted DNA is instead mediated by a trans-acting nuclease known as Cas3. In Type I-A and I-D systems, the activities of Cas3 are carried out by separate proteins called Cas3′ (helicase) and Cas3″ (nuclease). Type I-D systems also comprise Cas10d instead of Cas8.

[0067] The engineered CAST system may be derived from a Type I CRISPR-Cas system (such as subtypes I-B and I-F, including I-F variants). In some embodiments, the engineered CAST system is a Type I-F system. In some embodiments, the engineered CAST system is a Type I-F3 system.

[0068] On the other hand, type V systems belong to the Class 2 CRISPR-Cas systems, characterized by a single-protein effector complex that is programmed with a gRNA. The transposon-associated Type V CRISPR-Cas systems may be derived from: Anabaena variabilis ATCC 29413 (or Trichormus variabilis ATCC 29413 (see GenBank CP000117.1)), Cyanobacterium aponinum IPPAS B-1202, Filamentous cyanobacterium CCP2, Nostoc punctiforme PCC 73102, and Scytonema hofmannii PCC 7110. Type V systems comprise Cas12k, previously known as C2c5.

[0069] In some embodiments, the engineered CAST system is derived from Vibrio cholerae, Photobacterium iliopiscarium, Vibrio parahaemolyticus, Pseudoalteromonas sp., Pseudoalteromonas ruthenica, Photobacterium ganghwense, Shewanella sp., Vibrio diazotrophicus, Vibrio sp. 16, Vibrio sp. F12, Vibrio splendidus, Aliivibrio wodanis, Aliivibrio sp., Endozoicomonas ascidiicola, and Parashewanella spongiae.

[0070] In some embodiments, the system comprises components from different CAST systems. In some embodiments, one or more of the at least one Cas protein and one or more transposon-associated proteins may be derived from a homologous CRISPR-transposon system compared to the other protein components in the system. In some embodiments, the engineered CAST system is at least partially derived (e.g., contains one or more Cas protein or transposon-associated protein) from any one or more of: Vibrio cholerae, Photobacterium iliopiscarium, Vibrio parahaemolyticus, Pseudoalteromonas sp., Pseudoalteromonas ruthenica, Photobacterium ganghwense, Shewanella sp., Vibrio diazotrophicus, Vibrio sp. 16, Vibrio sp. F12, Vibrio splendidus, Aliivibrio wodanis, Aliivibrio sp., Endozoicomonas ascidiicola, and Parashewanella spongiae.

[0071] In some embodiments, the system comprises two or more engineered CAST systems. Pairing of orthogonal systems with their orthogonal donor DNA substrates enables tandem insertion of multiple distinct payloads directly adjacent to each other without any risk of repressive effects from target immunity. For example, one, two, three, four, five, or more orthogonal CAST systems may be used. In some embodiments, multiple orthogonal RNA-guided transposases and their transposon donor DNAs may be integrated into distal regions of a given chromosome or genome, such that the lack of sequence identity between the transposon ends of the distinct transposon DNA substrates prevents genetic instability and the risk of recombination.

[0072] In some embodiments, the engineered CAST system comprises Cas5, Cas6, Cas7, Cas8, or any combination thereof. In some embodiments, the engineered CAST system comprises Cas8-Cas5 fusion protein.

[0073] An engineered CAST system of the present invention may comprise one or more transposon-associated proteins (e.g., transposases or other components of a transposon). The transposon-associated proteins may facilitate recognition or cleavage of the target nucleic acid and subsequent insertion of the donor nucleic acid into the target nucleic acid.

[0074] In some embodiments, the transposon-associated proteins are derived from a Tn7 or Tn7-like transposon. Tn7 and Tn7-like transposons may be categorized based on the presence of the hallmark DDE-like transposase gene, tnsB (also referred to as tniA), the presence of a gene encoding a protein within the AAA+ ATPase family, tnsC (also referred to as tniB), one or more targeting factors that define integration sites (which may include a protein within the tniQ family, also referred to as tnsD, but sometimes includes other distinct targeting factors), and inverted repeat transposon ends that typically comprise multiple binding sites thought to be specifically recognized by the TnsB transposase protein. In Tn7, the targeting factors, or “target selectors,” comprise the genes tnsD and tnsE. Based on biochemical and genetics studies, it is known that TnsD binds a conserved attachment site in the 3′ end of the glmS gene, directing downstream integration, whereas TnsE binds the lagging strand replication fork and directs sequence-non-specific integration primarily into replicating/mobile plasmids.

[0075] The most well-studied member of this family of transposons is Tn7, hence why the broader family of transposons may be referred to as Tn7-like. “Tn7-like” term does not imply any particular evolutionary relationship between Tn7 and related transposons; in some cases, a Tn7-like transposon will be even more basal in the phylogenetic tree and thus Tn7 can be considered as having evolved from, or derived from, this related Tn7-like transposon.

[0076] Whereas Tn7 comprises tnsD and tnsE target selectors, related transposons comprise other genes for targeting. For example, Tn5090/Tn5053 encode a member of the tniQ family (a homolog of E. coli tnsD) as well as a resolvase gene tniR; Tn6230 encodes the protein TnsF; and Tn6022 encodes two uncharacterized open reading frames orf2 and orf3; Tn6677 and related transposons encode variant Type I-F and Type I-B CRISPR-Cas systems that work together with TniQ for RNA-guided mobilization; and other transposons encode Type V-U5 CRISPR-Cas systems that work together with TniQ for random and RNA-guided mobilization. Any of the above transposon systems are compatible with the systems and methods described herein.

[0077] In some embodiments, the one or more transposon-associated proteins comprise TnsA, TnsB, TnsC, or a combination thereof. In some embodiments, the one or more transposon-associated proteins comprise TnsB and TnsC. In some embodiments, the one or more transposon-associated proteins comprise TnsA, TnsB, and TnsC.

[0078] In some embodiments, the at least one transposon protein comprises a TnsA-TnsB fusion protein. TnsA and TnsB can be fused in any orientation: N-terminus to C-terminus; C-terminus to N-terminus; N-terminus to N-terminus; or C-terminus to C-terminus, respectively. Preferably the C-terminus of TnsA is fused to the N-terminus of TnsB.

[0079] In some embodiments, the TnsA-TnsB fusion may be fused using an amino acid linker peptide of various lengths to provide greater physical separation and allow more spatial mobility between the fused portions. The linker may comprise any amino acids and may be of any length. In some embodiments, the linker may be less than about 50 (e.g., 40, 30, 20, 10, or 5) amino acid residues.

[0080] In some embodiments, the linker is a flexible linker, such that TnsA and TnsB can have orientation freedom in relationship to each other. For example, a flexible linker may include amino acids having relatively small side chains, and which may be hydrophilic. Without limitation, the flexible linker may contain a stretch of glycine and/or serine residues. In some embodiments, the linker comprises at least one glycine-rich region. For example, the glycine-rich region may comprise a sequence comprising [GS]n, wherein n is an integer between 1 and 10.

[0081] In some embodiments, the linker further comprises a nuclear localization sequence (NLS). The NLS may be embedded within a linker sequence, such that it is flanked by additional amino acids. In some embodiments, the NLS is flanked on each end by at least a portion of a flexible linker. In some embodiments, the NLS is flanked on each end by a glycine rich region of the linker. Suitable nuclear localization sequences for use with the disclosed system are described further below and are applicable to use with the TnsA-TnsB fusion protein. In some embodiments, the linker comprises the amino acid sequence of GCGCGKRTADGSEFESPKKKRKVGSGSGG (SEQ ID NO: 168).

[0082] In some embodiments, the disclosed systems further comprise TnsD, TniQ, or a combination thereof or a nucleic acid encoding TnsD, TniQ, or a combination thereof. Thus, the one or more transposon-associated proteins may comprise TnsD, TniQ, or a combination thereof.

[0083] In some embodiments, the engineered CAST system comprises TnsA, TnsB, TnsC, TnsD and TniQ. In some embodiments, the engineered CAST system comprises Cas5, Cas6, Cas7, Cas8, TnsA, TnsB, TnsC, and at least one or both of TnsD or TniQ. In certain embodiments, the engineered CAST system comprises TnsD. In certain embodiments, the engineered CAST system comprises TniQ. In certain embodiments, the engineered CAST system comprises TnsD and TniQ.

[0084] In some embodiments, any combination of the at least one Cas protein and the at least one transposon associated protein may be expressed as a single fusion protein. In some embodiments, each of the at least one Cas protein and one or more of the at least one transposon-associated protein are part of a single fusion protein in which the components are expressed as a single megapeptide.

[0085] Sequences of exemplary Cas proteins, transposon-associated proteins, gRNAs, and transposon ends can also be found in International Patent Applications WO2020181264, WO2022261122, and WO2022266492 incorporated herein by reference.

[0086] In some embodiments, at least one of the one or more Cas protein comprises: a Cas6 protein comprising an amino acid sequence having at least 70% (e.g., having at least 75%, at least 80%, at least 85%, at least 90%, at least 92%, at least 95%, at least 96%, at least 97%, at least 98%, at least 99%, or 100%) identity to SEQ ID NO: 207 or 208; a Cas7 protein comprising an amino acid sequence having at least 70% (e.g., having at least 75%, at least 80%, at least 85%, at least 90%, at least 92%, at least 95%, at least 96%, at least 97%, at least 98%, at least 99%, or 100%) identity to SEQ ID NO: 205 or 206; or a Cas8-Cas5 fusion protein comprising an amino acid sequence having at least 70% (e.g., having at least 75%, at least 80%, at least 85%, at least 90%, at least 92%, at least 95%, at least 96%, at least 97%, at least 98%, at least 99%, or 100%) identity to SEQ ID NO: 203 or 204.

[0087] In some embodiments, at least one of the one or more transposon-associated proteins comprises: a TnsA protein comprising an amino acid sequence having at least 70% (e.g., having at least 75%, at least 80%, at least 85%, at least 90%, at least 92%, at least 95%, at least 96%, at least 97%, at least 98%, at least 99%, or 100%)) identity to SEQ ID NO: 195 or 196; a TnsB protein comprising an amino acid sequence having at least 70% (e.g., having at least 75%, at least 80%, at least 85%, at least 90%, at least 92%, at least 95%, at least 96%, at least 97%, at least 98%, at least 99%, or 100%)) identity to SEQ ID NO: 197 or 198; a TnsC protein comprising an amino acid sequence having at least 70% (e.g., having at least 75%, at least 80%, at least 85%, at least 90%, at least 92%, at least 95%, at least 96%, at least 97%, at least 98%, at least 99%, or 100%)) identity to SEQ ID NO: 199 or 200; or a TniQ protein comprising an amino acid sequence having at least 70% (e.g., having at least 75%, at least 80%, at least 85%, at least 90%, at least 92%, at least 95%, at least 96%, at least 97%, at least 98%, at least 99%, or 100%)) identity to SEQ ID NO: 201 or 202.

[0088] The invention is not limited to the disclosed or referenced exemplary sequences. Indeed, genetic sequences can vary between different strains, and this natural scope of allelic variation is included within the scope of the invention.

[0089] In other embodiments, any of the proteins described or referenced herein may comprise a sequence corresponding to, or substantially corresponding to, the wild-type version of the protein. For example, the sequence may substantially correspond to the wild-type protein sequence except for changes made for facile cloning or removal of known restriction sites. Thus, protein products from potential alternative start codons compared to the predicted nucleic acid sequences in this document are therefore not excluded.

[0090] Any of the proteins described or referenced herein may comprise one or more amino acid substitutions as compared to the recited sequences. An amino acid “replacement” or “substitution” refers to the replacement of one amino acid at a given position or residue by another amino acid at the same position or residue within a polypeptide sequence. Amino acids are broadly grouped as “aromatic” or “aliphatic.” An aromatic amino acid includes an aromatic ring. Examples of “aromatic” amino acids include histidine (H or His), phenylalanine (F or Phe), tyrosine (Y or Tyr), and tryptophan (W or Trp). Non-aromatic amino acids are broadly grouped as “aliphatic.” Examples of “aliphatic” amino acids include glycine (G or Gly), alanine (A or Ala), valine (V or Val), leucine (L or Leu), isoleucine (I or He), methionine (M or Met), serine (S or Ser), threonine (T or Thr), cysteine (C or Cys), proline (P or Pro), glutamic acid (E or Glu), aspartic acid (A or Asp), asparagine (N or Asn), glutamine (Q or Gin), lysine (K or Lys), and arginine (R or Arg).

[0091] The amino acid replacement or substitution can be conservative, semi-conservative, or non-conservative. The phrase “conservative amino acid substitution” or “conservative mutation” refers to the replacement of one amino acid by another amino acid with a common property. A functional way to define common properties between individual amino acids is to analyze the normalized frequencies of amino acid changes between corresponding proteins of homologous organisms (Schulz and Schirmer, Principles of Protein Structure, Springer-Verlag, New York (1979)). According to such analyses, groups of amino acids may be defined where amino acids within a group exchange preferentially with each other, and therefore resemble each other most in their impact on the overall protein structure (Schulz and Schirmer, supra). Examples of conservative amino acid substitutions include substitutions of amino acids within the sub-groups described above, for example, lysine for arginine and vice versa such that a positive charge may be maintained, glutamic acid for aspartic acid and vice versa such that a negative charge may be maintained, serine for threonine such that a free-OH can be maintained, and glutamine for asparagine such that a free —NH₂ can be maintained. “Semi-conservative mutations” include amino acid substitutions of amino acids within the same groups listed above, but not within the same sub-group. For example, the substitution of aspartic acid for asparagine, or asparagine for lysine, involves amino acids within the same group, but different sub-groups. “Non-conservative mutations” involve amino acid substitutions between different groups, for example, lysine for tryptophan, or phenylalanine for serine, etc.

[0092] The components of the system may be present in the system in various ratios. In some embodiments, each of the protein components or the nucleic acids encoding thereof are provided in a 1:1 ratio. For example, when each protein component is encoded on a single nucleic acid, the single nucleic acid comprises a single coding sequence for each protein component.

[0093] In some embodiments, any one of the protein components may be provided in greater abundance to any other protein component. In certain embodiments, Cas7 or the nucleic acid encoding Cas7 in greater abundance compared to the remaining protein components or nucleic acids encoding thereof. For example, multiple copies of a nucleic acid encoding Cas7 may be provided for each copy of any of the other components (e.g., Cas6, Cas5, Cas8, TniQ or TnsC). In some embodiments, Cas7 is encoded on a nucleic acid separate from any of the other components such that it can be provided in the system and methods herein at a higher abundance or dosage than the other components. Analogously, higher concentrations of the Cas7 protein can be provided in the systems and methods compared to the other proteins. In some embodiments, for every one copy of Cas6 or Cas8, or nucleic acids encoding thereof, 2 or more copies of Cas7 or a nucleic acid encoding Cas7 are included in the system. In some embodiments, for every one copy of Cas6 or Cas8 or nucleic acids encoding thereof, 5-10 copies of Cas7 or a nucleic acid encoding Cas7 are included in the system.

b. gRNA

[0094] In some embodiments, the engineered CAST systems further comprise a gRNA complementary to at least a portion of the target nucleic acid sequence, or a nucleic acid encoding the at least one gRNA.

[0095] The gRNA may be a crRNA, crRNA/tracrRNA (or single guide RNA, sgRNA). The terms “gRNA,” “guide RNA,” “crRNA,” and “CRISPR guide sequence” may be used interchangeably throughout and refer to a nucleic acid comprising a sequence that determines the binding specificity of the engineered CAST system. A gRNA hybridizes to (complementary to, partially or completely) a target nucleic acid sequence (e.g., the genome in a host cell). In some embodiments, the at least one gRNA is encoded in a CRISPR RNA (crRNA) array.

[0096] The system may further comprise a target nucleic acid. In some embodiments, target nucleic acid sequence comprises a human sequence.

[0097] The gRNA or portion thereof that hybridizes to the target nucleic acid (a target site) may be between 15-40 nucleotides in length. In some embodiments, the gRNA sequence that hybridizes to the target nucleic acid is 15, 16, 17, 18, 19, 20, 21, 22, 23, 24, 25, 26, 27, 28, 29, 30, 31, 32, 33, 34, 35, 36, 37, 38, 39, or 40 nucleotides in length. gRNAs or sgRNA(s) used in the present disclosure can be between about 5 and 100 nucleotides long, or longer (e.g., 5, 6, 7, 8, 9, 10, 11, 12, 13, 14, 15, 16, 17, 18, 19, 20, 21, 22, 23, 24, 25, 26, 27, 28, 29, 30, 31, 32, 33, 34, 35, 36, 37, 38, 39, 40, 41, 42, 43, 44, 45, 46, 47, 48, 49, 50, 51, 52, 53, 54, 55, 56, 57, 58, 59 60, 61, 62, 63, 63, 64, 65, 66, 67, 68, 69, 70, 71, 72, 73, 74, 75, 76, 77, 78, 79, 80, 81, 82, 83, 84, 85, 86, 87, 88, 89, 90, 91 92, 93, 94, 95, 96, 97, 98, 99, or 100 nucleotides in length, or longer).

[0098] To facilitate gRNA design, many computational tools have been developed (See Prykhozhij et al. (PLOS ONE, 10(3): (2015)); Zhu et al. (PLOS ONE, 9(9) (2014)); Xiao et al. (Bioinformatics. January 21 (2014)); Heigwer et al. (Nat Methods, 11(2): 122-123 (2014)). Methods and tools for guide RNA design are discussed by Zhu (Frontiers in Biology, 10 (4) pp 289-296 (2015)), which is incorporated by reference herein. Additionally, there are many publicly available software tools that can be used to facilitate the design of sgRNA(s); including but not limited to, Genscript Interactive CRISPR gRNA Design Tool, WU-CRISPR, and Broad Institute GPP sgRNA Designer. There are also publicly available pre-designed gRNA sequences to target many genes and locations within the genomes of many species (human, mouse, rat, zebrafish, C. elegans), including but not limited to, IDT DNA Predesigned Alt-R CRISPR-Cas9 guide RNAs, Addgene Validated gRNA Target Sequences, and GenScript Genome-wide gRNA databases.

[0099] In addition to a sequence that binds to a target nucleic acid, in some embodiments, the gRNA may also comprise a scaffold sequence (e.g., tracrRNA). In some embodiments, such a chimeric gRNA may be referred to as a single guide RNA (sgRNA). Exemplary scaffold sequences will be evident to one of skill in the art and can be found, for example, in Jinek, et al. Science (2012) 337(6096):816-821, and Ran, et al. Nature Protocols (2013) 8:2281-2308, incorporated herein by reference in their entireties.

[0100] In some embodiments, the gRNA sequence does not comprise a scaffold sequence and a scaffold sequence is expressed as a separate transcript. In such embodiments, the gRNA sequence further comprises an additional sequence that is complementary to a portion of the scaffold sequence and functions to bind (hybridize) the scaffold sequence.

[0101] As described elsewhere herein the protein and gRNA components of the system may be expressed and transcribed from the nucleic acids using any promoter or regulatory sequences known in the art. In some embodiments, the gRNA is transcribed under control of an RNA Polymerase II promoter. In some embodiments, the gRNA is transcribed under control of an RNA Polymerase III promoter.

[0102] In some embodiments, the gRNA sequence is at least 50%, 55%, 60%, 65%, 70%, 75%, 80%, 85%, 90%, 95%, 96%, 97%, 98%, 99%, or at least 100% complementary to a target nucleic acid. In some embodiments, the gRNA sequence is at least 50%, 55%, 60%, 65%, 70%, 75%, 80%, 85%, 90%, 95%, 96%, 97%, 98%, 99%, or at least 100% complementary to the 3′ end of the target nucleic acid (e.g., the last 5, 6, 7, 8, 9, or 10 nucleotides of the 3′ end of the target nucleic acid).

[0103] The gRNA may be a non-naturally occurring gRNA.

[0104] The system may further comprise a target nucleic acid. The target nucleic acid may be flanked by a protospacer adjacent motif (PAM). A PAM site is a nucleotide sequence in proximity to a target sequence. For example, PAM may be a DNA sequence immediately following the DNA sequence targeted by the engineered CAST system.

[0105] The target sequence may or may not be flanked by a protospacer adjacent motif (PAM) sequence. In certain embodiments, a nucleic acid-guided nuclease can only cleave a target sequence if an appropriate PAM is present, see, for example Doudna et al., Science, 2014, 346(6213): 1258096, incorporated herein by reference. A PAM can be 5′ or 3′ of a target sequence. A PAM can be upstream or downstream of a target sequence. In one embodiment, the target sequence is immediately flanked on the 3′ end by a PAM sequence. A PAM can be 1, 2, 3, 4, 5, 6, 7, 8, 9, 10 or more nucleotides in length. In certain embodiments, a PAM is between 2-6 nucleotides in length. The target sequence may or may not be located adjacent to a PAM sequence (e.g., PAM sequence located immediately 3′ of the target sequence) (e.g., for Type I CRISPR/Cas systems). In some embodiments, e.g., Type I systems, the PAM is on the alternate side of the protospacer (the 5′ end). Makarova et al. describes the nomenclature for all the classes, types, and subtypes of CRISPR systems (Nature Reviews Microbiology 13:722-736 (2015)). Guide structures and PAMs are described in by R. Barrangou (Genome Biol. 16:247 (2015)).

[0106] Non-limiting examples of the PAM sequences include: CC, CA, AG, GT, TA, AC, CA, GC, CG, GG, CT, TG, GA, AGG, TGG, T-rich PAMs (such as TTT, TTG, TTC, etc.), NGG, NGA, NAG, NGGNG and NNAGAAW (W=A or T), NNNNGATT, NAAR (R=A or G), NNGRR (R=A or G), NNAGAA, and NAAAAC, where N is any nucleotide. In some embodiments, the PAM may comprise a sequence of CN, in which N is any nucleotide. In select embodiments, the PAM may comprise a sequence of CC.

[0107] “Complementarity” refers to the ability of a nucleic acid to form hydrogen bond(s) with another nucleic acid sequence by either traditional Watson-Crick or other non-traditional types. A percent complementarity indicates the percentage of residues in a nucleic acid molecule, which can form hydrogen bonds (e.g., Watson-Crick base pairing) with a second nucleic acid sequence. Full complementarity is not necessarily required, provided there is sufficient complementarity to cause hybridization. There may be mismatches distal from the PAM.

[0108] In some embodiments, when the system comprises TnsA, TnsB, TnsC, TnsD and TniQ binding to the target nucleic acid may be mediated through a TnsD binding site within the target nucleic acid sequence. Thus, the recognition of the target nucleic acid utilizing the systems described herein may proceed in a gRNA-dependent and/or-independent manner.

c. Unfoldase

[0109] The present systems may further include at least one unfoldase protein. Unfoldases are proteins that catalyze the unfolding of a native protein without affecting the primary structure. The unfoldase may be an NTP driven unfoldase. NTP driven unfoldases may include ATP-dependent proteases, including, but not limited to, ATPases, AAA proteases, or AAA+ enzymes (e.g., AAA+ enzyme). In some embodiments, the at least one unfoldase protein may comprise ClpX (caseinolytic mitochondrial matrix peptidase chaperone subunit X). In some embodiments, the at least one unfoldase protein may comprise a homolog of ClpX.

[0110] ClpX homologs may be readily screened through systematic testing and optimization of a large panel of homologs, identified through bioinformatic search strategies such as BLASTp and psi-BLASTp. In some embodiments, the unfoldase protein (e.g., ClpX) is derived from the same host organism as that of the engineered CAST system. In some embodiments, the unfoldase protein (e.g., ClpX) is derived from a different host organism as that of the engineered CAST system. As such, the at least one unfoldase protein (e.g., ClpX) is not limited from which organism it is derived. In some embodiments, the unfoldase protein (e.g., ClpX) is derived from the E. coli genome. In other embodiments, the unfoldase protein (e.g., ClpX) from the cognate strain from which the engineered CAST system is derived. For example, the unfoldase protein from Vibrio cholerae HE-45 can be used alongside RNA-guided DNA integration machinery derived from Tn6677, while unfoldase proteins from Pseudoalteromonas sp. S983 can be used alongside RNA-guided DNA integration machinery derived from Tn7016. In some embodiments, the ClpX is selected from the proteins shown in Table 1, or homologs thereof. In some embodiments, the ClpX comprises an amino acid sequence having at least 70% similarity to any of SEQ ID NOs: 1-8.

d. Nuclear Localization Sequence

[0111] In the systems disclosed herein, one or more of the at least one Cas protein, the at least one transposon-associated protein, or the unfoldase protein (e.g., ClpX) may comprise a nuclear localization signal (NLS). The nuclear localization sequence may be appended to the one or more of the at least one Cas protein, the at least one transposon-associated protein and the unfoldase protein (e.g., ClpX) at a N-terminus, a C-terminus, embedded in the protein (e.g., inserted internally within the open reading frame (ORF)), or a combination thereof.

[0112] In some embodiments, one or more of the at least one Cas protein, the at least one transposon-associated protein, and the at least one unfoldase protein (e.g., ClpX) comprises two or more NLSs. The two or more NLSs may be in tandem, separated by a linker, at either end terminus of the protein, or embedded in the protein (e.g., inserted internally within the ORF instead).

[0113] The nuclear localization sequence may comprise any amino acid sequence known in the art to functionally tag or direct a protein for import into a cell's nucleus (e.g., for nuclear transport). Usually, a nuclear localization sequence comprises one or more positively charged amino acids, such as lysine and arginine.

[0114] In some embodiments, the NLS is a monopartite sequence. A monopartite NLS comprise a single cluster of positively charged or basic amino acids. In some embodiments, the monopartite NLS comprises a sequence of K-K/R-X-K/R, wherein X can be any amino acid. Exemplary monopartite NLS sequences include those from the SV40 large T-antigen, c-Myc, and TUS-proteins.

[0115] In some embodiments, the NLS is a bipartite sequence. Bipartite NLSs comprise two clusters of basic amino acids, separated by a spacer of about 9-12 amino acids. Exemplary bipartite NLSs include the NLS of nucleoplasmin, KR[PAATKKAGQA]KKKK (SEQ ID NO: 169), and the NLS of EGL-13, MSRRRKANPTKLSENAKKLAKEVEN (SEQ ID NO: 170). In some embodiments, the NLS comprises a bipartite SV40 NLS. In certain embodiments, the NLS comprises an amino acid sequence having at least 70% similarity to KRTADGSEFESPKKKRKV (SEQ ID NO: 171). In select embodiments, the NLS comprises, consists essentially of, or consists of an amino acid sequence of KRTADGSEFESPKKKRKV (SEQ ID NO: 171).

[0116] The protein components of the disclosed system (e.g., the Cas proteins, the transposon-associated proteins, or the unfoldase protein (e.g., ClpX)) may further comprise an epitope tag (e.g., 3× FLAG tag, an HA tag, a Myc tag, and the like). In some embodiments, the epitope tag may be adjacent, either upstream or downstream, to a nuclear localization sequence. The epitope tags may be at the N-terminus, a C-terminus, or a combination thereof of the corresponding protein.

e. Donor Nucleic Acid

[0117] The system may further include a donor nucleic acid to be integrated. The donor nucleic acid may be a part of a bacterial plasmid, bacteriophage, a virus, autonomously replicating extra chromosomal DNA element, linear plasmid, linear DNA, linear covalently closed DNA, mitochondrial or other organellar DNA, chromosomal DNA, and the like. In some embodiments, the donor nucleic acid comprises a cargo nucleic acid sequence.

[0118] The donor nucleic acid may be flanked by at least one transposon end sequence. In some embodiments, the donor nucleic acid is flanked on the 5′ and the 3′ end with a transposon end sequence. The term “transposon end sequence” refers to any nucleic acid comprising a sequence capable of forming a complex with the transposase enzymes thus designating the nucleic acid between the two ends for rearrangement. Usually, these sequences contain inverted repeats and may be about 10-150 base pairs long, however the exact sequence requirements differ for the specific transposase enzymes. Transposon ends sequences may or may not include additional sequences that promotes or augment transposition.

[0119] The transposon end sequences on either end may be the same or different. The transposon end sequence may be the endogenous CRISPR-transposon end sequences or may include deletions, substitutions, or insertions. The endogenous CRISPR-transposon end sequences may be truncated. In some embodiments, the transposon end sequence includes an about 40 base pair (bp) deletion relative to the endogenous CRISPR-transposon end sequence. In some embodiments, the transposon end sequence includes an about 100 base pair deletion relative to the endogenous CRISPR-transposon end sequence. The deletion may be in the form of a truncation at the distal (in relation to the cargo) end of the transposon end sequences.

[0120] The donor nucleic acid, and by extension the cargo nucleic acid, may of any suitable length, including, for example, about 50-100 bp (base pairs), about 100-1000 bp, at least or about 10 bp, at least or about 20 bp, at least or about 25 bp, at least or about 30 bp, at least or about 35 bp, at least or about 40 bp, at least or about 45 bp, at least or about 50 bp, at least or about 55 bp, at least or about 60 bp, at least or about 65 bp, at least or about 70 bp, at least or about 75 bp, at least or about 80 bp, at least or about 85 bp, at least or about 90 bp, at least or about 95 bp, at least or about 100 bp, at least or about 200 bp, at least or about 300 bp, at least or about 400 bp, at least or about 500 bp, at least or about 600 bp, at least or about 700 bp, at least or about 800 bp, at least or about 900 bp, at least or about 1 kb (kilobase pair), at least or about 2 kb, at least or about 3 kb, at least or about 4 kb, at least or about 5 kb, at least or about 6 kb, at least or about 7 kb, at least or about 8 kb, at least or about 9 kb, at least or about 10 kb, or greater.

f. Nucleic Acids

[0121] The one or more nucleic acids encoding the engineered CAST system or the nucleic acid encoding the unfoldase protein (e.g., ClpX) may be any nucleic acid including DNA, RNA, or combinations thereof. In some embodiments, nucleic acids comprise one or more messenger RNAs, one or more vectors, or any combination thereof.

[0122] The at least one Cas protein, the at least one transposon-associated protein, the at least one unfoldase protein (e.g., ClpX), the at least one gRNA, and the donor nucleic acid may be on the same or different nucleic acids (e.g., vector(s)). In some embodiments, the at least one Cas protein, the at least one transposon associated protein, and the unfoldase protein (e.g., ClpX) are encoded by different nucleic acids. In some embodiments, the at least one Cas protein and the at least one transposon associated protein encoded by a single nucleic acid. In some embodiments, the at least one Cas protein, the at least one transposon associated protein, and the at least one unfoldase protein (e.g., ClpX) are encoded by a single nucleic acid. In some embodiments, the at least one gRNA is encoded by a nucleic acid different from the nucleic acid(s) encoding the at least one Cas protein, the at least one transposon associated protein, and the at least one unfoldase protein (e.g., ClpX). In some embodiments, the at least one gRNA is encoded by a nucleic acid also encoding the at least one Cas protein, the at least one transposon associated protein, the at least one unfoldase protein (e.g., ClpX), or a combination thereof. In some embodiments, the nucleic acid encoding the at least one Cas protein, at least one transposon associated protein, the at least one unfoldase protein (e.g., ClpX), the at least one gRNA, or any combination thereof further comprises the donor nucleic acid.

[0123] In select embodiments, a single nucleic acid encodes the gRNA and at least one Cas protein. The gRNA may be encoded anywhere in the nucleic acid encoding the at least one Cas protein. In some embodiments, the gRNA is encoded in the 3′ UTR of the Cas protein-coding gene.

[0124] In certain embodiments, engineering the system for use in eukaryotic cells may involve codon-optimization. It will be appreciated that changing native codons to those most frequently used in mammals allows for maximum expression of the system proteins in mammalian cells (e.g., human cells). Such modified nucleic acid sequences are commonly described in the art as “codon-optimized,” or as utilizing “mammalian-preferred” or “human-preferred” codons. In some embodiments, the nucleic acid sequence is considered codon-optimized if at least about 60% (e.g., 65%, 70%, 75%, 80%, 85%, 90%, 95%, or 98%) of the codons encoded therein are mammalian preferred codons. Furthermore, in some embodiments, engineering the CRISPR-Cas system involves incorporating elements of the native CRISPR array into the disclosed system.

[0125] The present disclosure also provides for DNA segments encoding the proteins and nucleic acids disclosed herein, vectors containing these segments and cells containing the vectors. The vectors may be used to propagate the segment in an appropriate cell and/or to allow expression from the segment (e.g., an expression vector). The person of ordinary skill in the art would be aware of the various vectors available for propagation and expression of a nucleic acid sequence.

[0126] The present disclosure further provides engineered, non-naturally occurring vectors and vector systems, which can encode one or more or all of the components of the present system. The vector(s) can be introduced into a cell that is capable of expressing the polypeptide encoded thereby, including any suitable prokaryotic or eukaryotic cell.

[0127] The vectors of the present disclosure may be delivered to a eukaryotic cell in a subject. Modification of the eukaryotic cells via the present system can take place in a cell culture, where the method comprises isolating the eukaryotic cell from a subject prior to the modification. In some embodiments, the method further comprises returning said eukaryotic cell and/or cells derived therefrom to the subject.

[0128] Viral and non-viral based gene transfer methods can be used to introduce nucleic acids encoding components of the present system into cells, tissues, or a subject. Such methods can be used to administer nucleic acids encoding components of the present system to cells in culture, or in a host organism. Non-viral vector delivery systems include DNA plasmids, cosmids, RNA (e.g., a transcript of a vector described herein), a nucleic acid, and a nucleic acid complexed with a delivery vehicle. Viral vector delivery systems include DNA and RNA viruses, which have either episomal or integrated genomes after delivery to the cell. Viral vectors include, for example, retroviral, lentiviral, adenoviral, adeno-associated and herpes simplex viral vectors.

[0129] In certain embodiments, plasmids that are non-replicative, or plasmids that can be cured by high temperature may be used, such that any or all of the necessary components of the system may be removed from the cells under certain conditions. For example. this may allow for DNA integration by transforming bacteria of interest, but then being left with engineered strains that have no memory of the plasmids or vectors used for the integration.

[0130] Drug selection strategies may be adopted for positively selecting for cells that underwent DNA integration. A donor nucleic acid may contain one or more drug-selectable markers within the cargo. Then presuming that the original donor plasmid is removed, drug selection may be used to enrich for integrated clones. Colony screenings may be used to isolate clonal events.

[0131] A variety of viral constructs may be used to deliver the present system (such as one or more Cas proteins, transposon associated proteins, unfoldase proteins (e.g., ClpX), gRNA(s), donor DNA, etc.) to the targeted cells and/or a subject. Nonlimiting examples of such recombinant viruses include recombinant adeno-associated virus (AAV), recombinant adenoviruses, recombinant lentiviruses, recombinant retroviruses, recombinant herpes simplex viruses, recombinant poxviruses, phages, etc. The present disclosure provides vectors capable of integration in the host genome, such as retrovirus or lentivirus. See, e.g., Ausubel et al., Current Protocols in Molecular Biology, John Wiley & Sons, New York, 1989; Kay, M. A., et al., 2001 Nat. Medic. 7(1):33-40; and Walther W. and Stein U., 2000 Drugs, 60(2): 249-71, incorporated herein by reference.

[0132] In one embodiment, a DNA segment encoding the present protein(s) is contained in a plasmid vector that allows expression of the protein(s) and subsequent isolation and purification of the protein produced by the recombinant vector. Accordingly, the proteins disclosed herein can be purified following expression, obtained by chemical synthesis, or obtained by recombinant methods.

[0133] To construct cells that express the present system, expression vectors for stable or transient expression of the present system may be constructed via conventional methods as described herein and introduced into host cells. For example, nucleic acids encoding the components of the present system may be cloned into a suitable expression vector, such as a plasmid or a viral vector in operable linkage to a suitable promoter. The selection of expression vectors/plasmids/viral vectors should be suitable for integration and replication in eukaryotic cells.

[0134] In certain embodiments, vectors of the present disclosure can drive the expression of one or more sequences in prokaryotic cells. Promoters that may be used include T7 RNA polymerase promoters, constitutive E. coli promoters, and promoters that could be broadly recognized by transcriptional machinery in a wide range of bacterial organisms. The system may be used with various bacterial hosts.

[0135] In certain embodiments, vectors of the present disclosure can drive the expression of one or more sequences in mammalian cells using a mammalian expression vector. Examples of mammalian expression vectors include pCDM8 (Seed, Nature (1987) 329:840, incorporated herein by reference) and pMT2PC (Kaufman, et al., EMBO J. (1987) 6:187, incorporated herein by reference). When used in mammalian cells, the expression vector's control functions are typically provided by one or more regulatory elements. For example, commonly used promoters are derived from polyoma, adenovirus 2, cytomegalovirus, simian virus 40, and others disclosed herein and known in the art. For other suitable expression systems for both prokaryotic and eukaryotic cells see, e.g., Chapters 16 and 17 of Sambrook, et al., MOLECULAR CLONING: A LABORATORY MANUAL. 2nd eds., Cold Spring Harbor Laboratory, Cold Spring Harbor Laboratory Press, Cold Spring Harbor, N.Y., 1989, incorporated herein by reference.

[0136] Vectors of the present disclosure can comprise any of a number of promoters known to the art, wherein the promoter is constitutive, regulatable or inducible, cell type specific, tissue-specific, or species specific. In addition to the sequence sufficient to direct transcription, a promoter sequence of the invention can also include sequences of other regulatory elements that are involved in modulating transcription (e.g., enhancers, Kozak sequences and introns). Many promoter/regulatory sequences useful for driving constitutive expression of a gene are available in the art and include, but are not limited to, for example, CMV (cytomegalovirus promoter), EF1a (human elongation factor 1 alpha promoter), SV40 (simian vacuolating virus 40 promoter), PGK (mammalian phosphoglycerate kinase promoter), Ubc (human ubiquitin C promoter), human beta-actin promoter, rodent beta-actin promoter, CBh (chicken beta-actin promoter), CAG (hybrid promoter contains CMV enhancer, chicken beta actin promoter, and rabbit beta-globin splice acceptor), TRE (Tetracycline response element promoter), H1 (human polymerase III RNA promoter), U6 (human U6 small nuclear promoter), and the like. Additional promoters that can be used for expression of the components of the present system, include, without limitation, cytomegalovirus (CMV) intermediate early promoter, a viral LTR such as the Rous sarcoma virus LTR, HIV-LTR, HTLV-1 LTR, Maloney murine leukemia virus (MMLV) LTR, myeoloproliferative sarcoma virus (MPSV) LTR, spleen focus-forming virus (SFFV) LTR, the simian virus 40 (SV40) early promoter, herpes simplex tk virus promoter, elongation factor 1-alpha (EF1-α) promoter with or without the EF1-a intron. Additional promoters include any constitutively active promoter. Alternatively, any regulatable promoter may be used, such that its expression can be modulated within a cell.

[0137] Moreover, inducible and tissue specific expression of a RNA, transmembrane proteins, or other proteins can be accomplished by placing the nucleic acid encoding such a molecule under the control of an inducible or tissue specific promoter/regulatory sequence. Examples of tissue specific or inducible promoter/regulatory sequences which are useful for this purpose include, but are not limited to, the rhodopsin promoter, the MMTV LTR inducible promoter, the SV40 late enhancer/promoter, synapsin 1 promoter, ET hepatocyte promoter, GS glutamine synthase promoter and many others. Various commercially available ubiquitous as well as tissue-specific promoters and tumor-specific are available, for example from InvivoGen. In addition, promoters which are well known in the art can be induced in response to inducing agents such as metals, glucocorticoids, tetracycline, hormones, and the like, are also contemplated for use with the invention. Thus, it will be appreciated that the present disclosure includes the use of any promoter/regulatory sequence known in the art that is capable of driving expression of the desired protein operably linked thereto.

[0138] The vectors of the present disclosure may direct expression of the nucleic acid in a particular cell type (e.g., tissue-specific regulatory elements are used to express the nucleic acid). Such regulatory elements include promoters that may be tissue specific or cell specific. The term “tissue specific” as it applies to a promoter refers to a promoter that is capable of directing selective expression of a nucleotide sequence of interest to a specific type of tissue (e.g., seeds) in the relative absence of expression of the same nucleotide sequence of interest in a different type of tissue. The term “cell type specific” as applied to a promoter refers to a promoter that is capable of directing selective expression of a nucleotide sequence of interest in a specific type of cell in the relative absence of expression of the same nucleotide sequence of interest in a different type of cell within the same tissue. The term “cell type specific” when applied to a promoter also means a promoter capable of promoting selective expression of a nucleotide sequence of interest in a region within a single tissue. Cell type specificity of a promoter may be assessed using methods well known in the art, e.g., immunohistochemical staining.

[0139] Additionally, the vector may contain, for example, some or all of the following: a selectable marker gene, such as the neomycin gene for selection of stable or transient transfectants in host cells; enhancer/promoter sequences from the immediate early gene of human CMV for high levels of transcription; transcription termination and RNA processing signals from SV40 for mRNA stability; 5′- and 3′-untranslated regions for mRNA stability and translation efficiency from highly-expressed genes like α-globin or β-globin; SV40 polyoma origins of replication and ColE1 for proper episomal replication; internal ribosome binding sites (IRESes), versatile multiple cloning sites; T7 and SP6 RNA promoters for in vitro transcription of sense and antisense RNA; a “suicide switch” or “suicide gene” which when triggered causes cells carrying the vector to die (e.g., HSV thymidine kinase, an inducible caspase such as iCasp9), and reporter gene for assessing expression of the chimeric receptor. Suitable vectors and methods for producing vectors containing transgenes are well known and available in the art. Selectable markers also include chloramphenicol resistance, tetracycline resistance, spectinomycin resistance, streptomycin resistance, erythromycin resistance, rifampicin resistance, bleomycin resistance, thermally adapted kanamycin resistance, gentamycin resistance, hygromycin resistance, trimethoprim resistance, dihydrofolate reductase (DHFR), GPT; the URA3, HIS4, LEU2, and TRP1 genes of S. cerevisiae.

[0140] When introduced into the cell, the vectors may be maintained as an autonomously replicating sequence or extrachromosomal element or may be integrated into host DNA.

[0141] In one embodiment, the donor DNA may be delivered using the same gene transfer system as used to deliver the Cas protein, and/or transposon associated proteins (included on the same vector) or may be delivered using a different delivery system. In another embodiment, the donor DNA may be delivered using the same transfer system as used to deliver gRNA(s).

[0142] In one embodiment, the present disclosure comprises integration of exogenous DNA into the endogenous gene. Alternatively, an exogenous DNA is not integrated into the endogenous gene. The DNA may be packaged into an extrachromosomal or episomal vector (such as AAV vector), which persists in the nucleus in an extrachromosomal state, and offers donor-template delivery and expression without integration into the host genome. Use of extrachromosomal gene vector technologies has been discussed in detail by Wade-Martins R (Methods Mol Biol. 2011; 738:1-17, incorporated herein by reference).

[0143] The present system (e.g., proteins, polynucleotides encoding these proteins, donor polynucleotides and compositions comprising the proteins and/or polynucleotides described herein) may be delivered by any suitable means. In certain embodiments, the system is delivered in vivo. In other embodiments, the system is delivered to isolated/cultured cells (e.g., autologous iPS cells) in vitro to provide modified cells useful for in vivo delivery to patients afflicted with a disease or condition.

[0144] Vectors according to the present disclosure can be transformed, transfected, or otherwise introduced into a wide variety of cells. Transfection refers to the taking up of a vector by a cell whether or not any coding sequences are in fact expressed. Numerous methods of transfection are known to the ordinarily skilled artisan, for example, lipofectamine, calcium phosphate co-precipitation, electroporation, DEAE-dextran treatment, microinjection, viral infection, and other methods known in the art. Transduction refers to entry of a virus into the cell and expression (e.g., transcription and/or translation) of sequences delivered by the viral vector genome. In the case of a recombinant vector, “transduction” generally refers to entry of the recombinant viral vector into the cell and expression of a nucleic acid of interest delivered by the vector genome.

[0145] Any of the vectors comprising a nucleic acid sequence that encodes the components of the present system is also within the scope of the present disclosure. Such a vector may be delivered into host cells by a suitable method. Methods of delivering vectors to cells are well known in the art and may include DNA or RNA electroporation, transfection reagents such as liposomes or nanoparticles to delivery DNA or RNA; delivery of DNA, RNA, or protein by mechanical deformation (see, e.g., Sharei et al. Proc. Natl. Acad. Sci. USA (2013) 110(6): 2082-2087, incorporated herein by reference); or viral transduction. In some embodiments, the vectors are delivered to host cells by viral transduction. Nucleic acids can be delivered as part of a larger construct, such as a plasmid or viral vector, or directly, e.g., by electroporation, lipid vesicles, viral transporters, microinjection, and biolistics (high-speed particle bombardment). Similarly, the construct containing the one or more transgenes can be delivered by any method appropriate for introducing nucleic acids into a cell. In some embodiments, the construct or the nucleic acid encoding the components of the present system is a DNA molecule. In some embodiments, the nucleic acid encoding the components of the present system is a DNA vector and may be electroporated to cells. In some embodiments, the nucleic acid encoding the components of the present system is an RNA molecule, which may be electroporated to cells.

[0146] Additionally, delivery vehicles such as nanoparticle- and lipid-based mRNA or protein delivery systems can be used. Further examples of delivery vehicles include lentiviral vectors, ribonucleoprotein (RNP) complexes, lipid-based delivery system, gene gun, hydrodynamic, electroporation or nucleofection microinjection, and biolistics. Various gene delivery methods are discussed in detail by Nayerossadat et al. (Adv Biomed Res. 2012; 1: 27) and Ibraheem et al. (Int J Pharm. 2014 Jan. 1; 459(1-2):70-83), incorporated herein by reference.

### Methods

[0147] Also disclosed herein are methods for nucleic acid modification (e.g., insertion/deletion) utilizing the disclosed systems or kits. The methods may comprise contacting a target nucleic acid sequence with a system disclosed herein or a composition comprising the system. The descriptions and embodiments provided above for the engineered CAST system (e.g., the Cas proteins and transposon associated proteins), the at least one unfoldase protein (e.g., ClpX), the gRNA, and the donor nucleic acid are applicable to the methods described herein.

[0148] The target nucleic acid sequence may be in a cell. In some embodiments, contacting a target nucleic acid sequence comprises introducing the system into the cell. As described above the system may be introduced into eukaryotic or prokaryotic cells by methods known in the art. In some embodiments, the cell is a mammalian cell. In some embodiments, the cell is a human cell.

[0149] In some embodiments, the target nucleic acid is a nucleic acid endogenous to a target cell. In some embodiments, the target nucleic acid is a genomic DNA sequence. The term “genomic,” as used herein, refers to a nucleic acid sequence (e.g., a gene or locus) that is located on a chromosome in a cell.

[0150] In some embodiments, the target nucleic acid encodes a gene or gene product. The term “gene product,” as used herein, refers to any biochemical product resulting from expression of a gene. Gene products may be RNA or protein. RNA gene products include non-coding RNA, such as tRNA, rRNA, micro RNA (miRNA), and small interfering RNA (siRNA), and coding RNA, such as messenger RNA (mRNA). In some embodiments, the target nucleic acid sequence encodes a protein or polypeptide.

[0151] Polynucleotides containing the target nucleic acid sequence may include, but is not limited to, purified chromosomal DNA, total cDNA, cDNA fractionated according to tissue or expression state (e.g., after heat shock or after cytokine treatment other treatment) or expression time (after any such treatment) or developmental stage, plasmid, cosmid, BAC, YAC, phage library, etc. Polynucleotides containing the target site may include DNA from organisms such as Homo sapiens, Mus domesticus, Mus spretus, Canis domesticus, Bos, Caenorhabditis elegans, Plasmodium falciparum, Plasmodium vivax, Onchocerca volvulus, Brugia malayi, Dirofilaria immitis, Leishmania, Zea maize, Arabidopsis thaliana, Glycine max, Drosophila melanogaster, Saccharomyces cerevisiae, Schizosaccharomyces pombe, Neurospora, Escherichia coli, Salmonella typhimurium, Bacillus subtilis, Neisseria gonorrhoeae, Staphylococcus aureus, Streptococcus pneumonia, Mycobacterium tuberculosis, Aquifex, Thermus aquaticus, Pyrococcus furiosus, Thermus littoralis, Methanobacterium thermoautotrophicum, Sulfolobus caldoaceticus, and others.

[0152] The method may comprise administering to the subject, in vivo, or by transplantation of ex vivo treated cells, an effective amount of the described system. In some embodiments, the vector(s) is delivered to the tissue of interest by, for example, an intramuscular, intravenous, transdermal, intranasal, oral, mucosal, or other delivery methods.

[0153] The components of the present system or ex vivo treated cells may be administered with a pharmaceutically acceptable carrier or excipient as a pharmaceutical composition. In some embodiments, the components of the present system may be mixed, individually or in any combination, with a pharmaceutically acceptable carrier to form pharmaceutical compositions, which are also within the scope of the present disclosure.

[0154] In some embodiments, an effective amount of the components of the present system or compositions as described herein can be administered. As used herein the term “effective amount” may be used interchangeably with the term “therapeutically effective amount” and refers to that quantity that is sufficient to result in a desired activity upon administration to a subject in need thereof. Within the context of the present disclosure, the term “effective amount” refers to that quantity of the components of the system such that successful DNA integration is achieved.

[0155] When utilized as a method of treatment, the effective amount may depend on the particular condition being treated, the severity of the condition, the individual patient parameters including age, physical condition, size, gender and weight, the duration of the treatment, the nature of concurrent therapy (if any), the specific route of administration and like factors within the knowledge and expertise of the health practitioner. In some embodiments, the effective amount alleviates, relieves, ameliorates, improves, reduces the symptoms, or delays the progression of any disease or disorder in the subject. In some embodiments, the subject is a human.

[0156] In the context of the present disclosure insofar as it relates to any of the disease conditions recited herein, the terms “treat,” “treatment,” and the like mean to relieve or alleviate at least one symptom associated with such condition, or to slow or reverse the progression of such condition. Within the meaning of the present disclosure, the term “treat” also denotes to arrest, delay the onset (e.g., the period prior to clinical manifestation of a disease) and/or reduce the risk of developing or worsening a disease. For example, in connection with cancer the term “treat” may mean eliminate or reduce a patient's tumor burden, or prevent, delay, or inhibit metastasis, etc.

[0157] The phrase “pharmaceutically acceptable,” as used in connection with compositions and/or cells of the present disclosure, refers to molecular entities and other ingredients of such compositions that are physiologically tolerable and do not typically produce untoward reactions when administered to a subject (e.g., a mammal, a human). Preferably, as used herein, the term “pharmaceutically acceptable” means approved by a regulatory agency of the Federal or a state government or listed in the U.S. Pharmacopeia or other generally recognized pharmacopeia for use in mammals, and more particularly in humans. “Acceptable” means that the carrier is compatible with the active ingredient of the composition (e.g., the nucleic acids, vectors, cells, or therapeutic antibodies) and does not negatively affect the subject to which the composition(s) are administered. Any of the pharmaceutical compositions and/or cells to be used in the present methods can comprise pharmaceutically acceptable carriers, excipients, or stabilizers in the form of lyophilized formations or aqueous solutions.

[0158] Pharmaceutically acceptable carriers, including buffers, are well known in the art, and may comprise phosphate, citrate, and other organic acids; antioxidants including ascorbic acid and methionine; preservatives; low molecular weight polypeptides; proteins, such as serum albumin, gelatin, or immunoglobulins; amino acids; hydrophobic polymers; monosaccharides; disaccharides; and other carbohydrates; metal complexes; and/or non-ionic surfactants. See, e.g., Remington: The Science and Practice of Pharmacy 20th Ed. (2000) Lippincott Williams and Wilkins, Ed. K. E. Hoover.

[0159] The methods may be used for a variety of purposes. For example, the methods may include, but are not limited to, inactivation of a microbial gene, RNA-guided DNA integration in a plant or animal cell, methods of treating a subject suffering from a disease or disorder (e.g., cancer, Duchenne muscular dystrophy (DMD), sickle cell disease (SCD), β-thalassemia, and hereditary tyrosinemia type I (HT1)), and methods of treating a diseased cell (e.g., a cell deficient in a gene which causes cancer).

### Kits

[0160] Also within the scope of the present disclosure are kits that include the components of the present system.

[0161] The kit may include instructions for use in any of the methods described herein. The instructions can comprise a description of administration of the present system or composition to a subject to achieve the intended effect. The instructions generally include information as to dosage, dosing schedule, and route of administration for the intended treatment. The kit may further comprise a description of selecting a subject suitable for treatment based on identifying whether the subject is in need of the treatment.

[0162] The kits provided herein are in suitable packaging. Suitable packaging includes, but is not limited to, vials, bottles, jars, flexible packaging, and the like.

[0163] The packaging may be unit doses, bulk packages (e.g., multi-dose packages) or sub-unit doses. Instructions supplied in the kits of the disclosure are typically written instructions on a label or package insert. The label or package insert indicates that the pharmaceutical compositions are used for treating, delaying the onset, and/or alleviating a disease or disorder in a subject.

[0164] Kits optionally may provide additional components such as buffers and interpretive information. Normally, the kit comprises a container and a label or package insert(s) on or associated with the container. In some embodiment, the disclosure provides articles of manufacture comprising contents of the kits described above.

[0165] The kit may further comprise a device for holding or administering the present system or composition. The device may include an infusion device, an intravenous solution bag, a hypodermic needle, a vial, and/or a syringe.

[0166] The present disclosure also provides for kits for performing DNA integration in vitro. The kit may include the components of the present system. Optional components of the kit include one or more of the following: buffer constituents, control plasmid, sequencing primers, cells, and the like.

### EXAMPLES

[0167] The following are examples of the present invention and are not to be construed as limiting.

[0168] The following nomenclature details are applicable: Tn6677 encodes a naturally occurring Cas8-Cas5 fusion protein, as part of the Type I-F CRISPR-Cas system, referred to herein as Cas8, for simplicity; the Type I-F CRISPR-Cas system encoded within Tn7-like transposons may be more specifically referred to as Type I-F3, however Type I-F may be used for simplicity; the complex known as TniQ-Cascade, or QCascade (for simplicity), comprises crRNA (one copy), Cas8 (one copy), Cas7 (six copies), Cas6 (one copy), and TniQ (two copies); in some contexts, QCascade subunits have been referred to with other gene and protein naming schemes, e.g. Csy1 or Csy2 or Cas8f instead of Cas8; Csy3 or Cas7f Cas7; Csy4 or Cas6f instead of Cas6; the mini-transposon, also known as a mini-Tn, refers to the mobilizable DNA containing a cargo/payload sequence flanked by conserved left (L) and right (R) ends of the transposon; the mini-Tn may be encoded within a larger donor DNA molecule, for example a plasmid-based donor, or pDonor. Guide RNA (gRNA) for CRISPR-associated transposon (CAST) systems may be equivalently referred to as CRISPR RNA (crRNA), and herein gRNA and crRNA are used synonymously. Finally, CAST systems may also be referred to as INTEGRATE systems; CRISPR-transposon systems; CRISPR-Tn systems; RNA-guided transposase systems; RNA-guided DNA integration system; or a similar set of synonymous terms to refer to the core technology as molecular machinery. RNA-guided DNA integration by CAST systems may involve a diverse array of targeting proteins, which include Cascade from Type I-B, Type I-D, and Type I-F CRISPR-Cas systems, and Cas12k from Type V-K CRISPR-Cas systems.

### Materials and Methods

[0169] Plasmid construction. Genes were human codon-optimized and synthesized by Genscript, and plasmids were generated using a combination of restriction digestion, ligation, Gibson assembly, and inverted (around-the-horn) PCR. All PCR fragments for cloning were generated using Q5 DNA Polymerase (NEB).

[0170] The CRISPR array sequence (repeat-spacer-repeat) for VchCAST is as follows: 5′-GTGAACTGCCGAGTAGGTAGCTGATAAC (SEQ ID NO: 172)-N₃₂-GTGAACTGCCGAGTAGGTAGCTGATAAC (SEQ ID NO: 172)-3′ where N₃₂ represents the 32-nt guide region.

[0171] The sequence of the mature crRNA is as follows: 5′-CUGAUAAC (SEQ ID NO: 173)-N₃₂-GUGAACUGCCGAGUAGGUAG (SEQ ID NO: 174)-3′.

[0172] The CRISPR array sequence (repeat-spacer-repeat) for PseCAST is as follows: 5′-GTGACCTGCCGTATAGGCAGCTGAAAAT (SEQ ID NO: 175)-N₃₂-GTGACCTGCCGTATAGGCAGCTGAAAAT (SEQ ID NO: 175)-3′ where N32 represents the 32-nt guide region.

[0173] The sequence of the mature crRNA is as follows: 5′-CUGAAAAU (SEQ ID NO: 176)-N₃₂-GUGACCUGCCGUAUAGGCAG (SEQ ID NO: 177)-3′.

[0174] ‘Atypical’ repeats (See, Klompe, S. E. et al. Mol. Cell 82, 616-628.e5 (2022) and Petassi, M. T., Hsieh, S. & Peters, J. E. Cell 183, 1757-1771.e18 (2020), incorporated herein by reference) were also used for PseCAST (unless otherwise mentioned) to reduce the likelihood of recombination during cloning. For these variant CRISPR arrays, the repeat-spacer-repeat sequence is as follows: 5′-GTGACCTGCCGTATAGGCAGCTGAAGAT (SEQ ID NO: 178)-N₃₂-TAATTCTGCCGAAAAGGCAGTGAGTAGT (SEQ ID NO: 179)-3′ where N32 represents the N₃₂-nt guide region. The sequence of the mature crRNA is as follows: 5′-CUGAAGAU (SEQ ID NO: 180)-N₃₂-UAAUUCUGCCGAAAAGGCAG (SEQ ID NO: 181)-3′. Where noted, the 32-nt guide region was modified to have varying lengths. The repeat sequences flanking the guide region were not modified in these experiments.

[0175] Clp proteins from the E. coli genome were PCR amplified from BL21 DE3 cells with primers that specifically amplified the open reading frame of the indicated protein and cloned into pcDNA3.1 expression vectors with an N-terminal bipartite-NLS tag. ClpX sequences from E. coli, Pseudoalteromonas sp., and V. cholerae were then codon-optimized by Genscript and ordered as Twist fragments to be cloned into pcDNA3.1 expression vectors with an N-terminal bipartite-NLS tag.

[0176] E. coli culturing and general transposition assays. Chemically competent E. coli BL21 (DE3) cells carrying pDonor, pDonor and pTnsABC, or pDonor and pQCascade, were prepared and transformed with 150-250 ng of pEffector, pQCascade, or pTnsABC, respectively. Transformations were plated on agar plates with the appropriate antibiotics (100 μg/ml spectinomycin, 100 μg/ml carbenicillin, 50 μg/ml kanamycin) and 0.1 mM IPTG. For bacterial transposition assays investigating PseCAST activity, cells were co-transformed with pEffector and pDonor. Cells were incubated for 18-20 h at 37° C. and typically grew as densely spaced colonies, before being scraped, resuspended in LB medium, and prepared for subsequent analysis. A full list of all plasmids used for transposition experiments is provided in Table 1, and a list of crRNAs used is provided in Table 3.

[0177] E. coli qPCR analysis of transposition products. The optical density of resuspended colonies from the transposition assays was measured at 600 nm, and approximately 3.2×10⁸ cells (the equivalent of 200 μl of OD600=2.0) were pelleted by centrifugation at 4,000×g for 5 min. The cell pellets were resuspended in 80 μl of H₂O, before being lysed by incubating at 95° C. for 10 min in a thermal cycler. The cell debris was pelleted by centrifugation at 4,000×g for 5 min, and 5 μl of lysate supernatant was removed and serially diluted in water to generate 20- and 500-fold lysate dilutions for qPCR analysis.

[0178] Integration in the T-RL orientation was measured by qPCR by comparing Cq values of a T-RL-specific primer pair (one transposon- and one genome-specific primer) to a genome-specific primer pair that amplifies an E. coli reference gene (rssA). Transposition efficiency was then calculated as 2^{ΔCq}, in which ΔCq is the Cq difference between the experimental reaction and the reference reaction. qPCR reactions (10 μl) contained 5 μl of SsoAdvanced Universal SYBR Green Supermix (BioRad), 1 μl H2O, 2 μl of 2.5 μM primers, and 2 μl of 500-fold diluted cell lysate. Reactions were prepared in 384-well white PCR plates (BioRad), and measurements were performed on a CFX384 Real-Time PCR Detection System (BioRad) using the following thermal cycling parameters: polymerase activation and DNA denaturation (98° C. for 3 min), and 35 cycles of amplification (98° C. for 10 s, 59° C. for 1 min).

[0179] Mammalian cell culture and transfections. HEK293T cells were cultured at 37° C. and 5% CO₂. Cells were maintained in DMEM media with 10% FBS and 100 U/mL of penicillin and streptomycin (Fisher Scientific). The cell line was authenticated by the supplier and tested negative for mycoplasma.

[0180] Cells were typically seeded at approximately 100,000 cells per well in a 24-well plate (Eppendorf or Fisher Scientific) coated with poly-D-lysine (Fisher Scientific), 24 hours prior to transfection. Cells were transfected with DNA mixtures and 2 μl of Lipofectamine 2000 (Fisher Scientific), per the manufacturer's instructions. Transfection reactions typically contained between 1 μg and 1.5 μg of total DNA. For detailed transfection parameters specific to distinct assays, please refer to the sections below.

[0181] Western immunoblotting and nuclear/cytoplasmic fractionation. Cells were transfected with epitope-tagged protein expression plasmids. Approximately 72 hours after transfection, cells were washed with PBS and harvested using Cell Lysis Buffer (150 mM NaCl, 0.1% Triton X-100, 50 mM Tris-HCl pH 8.0, Protease inhibitor (Sigma Aldrich)). For nuclear and cytoplasmic fractionation experiments, cells were harvested using Cell Lysis Buffer (Thermo Fisher Scientific) per the manufacturer's instructions. Proteins were separated by SDS-PAGE and transferred to a PVDF membrane (Fisher Scientific). The membrane was then washed with TBS-T (50 mM Tris-Cl, pH 7.5, 150 mM NaCl, 0.1% Tween-20) and blocked with blocking buffer (TBS-T with 5% w/v BSA). Membranes were then incubated with primary antibodies overnight at 4° C. in blocking buffer. Membranes were then washed and incubated with secondary antibodies at room temperature for one hour. All antibodies (both primary and secondary) were diluted 1:10,000 in blocking buffer. Membranes were again washed and then developed with SuperSignal West Dura (Thermo Fisher).

[0182] HEK293T fluorescent reporter assays and flow cytometry analysis and sorting. HEK293T cells were seeded at approximately 50,000 cells per well in a 24-well plate coated with poly-D-lysine 24 hours prior to transfection. For Cas6-mediated RNA processing assays, cells were co-transfected with 300 ng of GFP-reporter plasmid, 300 ng of pCas6, and 10 ng of an mCherry expression plasmid (as a transfection marker). In negative control experiments, cells were transfected with 300 ng of a pdCas9 instead of a pCas6 to control for possible expression burden or squelching. For transcriptional activation assays, cells were co-transfected with 60 ng of reporter plasmid, 20 ng of a plasmid encoding an orthogonal fluorescent protein (as a transfection marker), and the additional indicated plasmids. In separate wells, cells were transfected with 100 ng of Cas9-based transcriptional activators and 50 ng of either a non-targeting or targeting sgRNA as positive controls.

[0183] DNA mixtures were transfected using 2 μl of Lipofectamine 2000 (Fisher Scientific), per the manufacturer's instructions. Approximately 72-96 hours after transfection, cells were collected for assay by flow cytometry. Transfected cells were analyzed by gating based on fluorescent intensity of the transfection marker relative to a negative control (see Yeo, N. C. et al. Nat. Methods 15, 611-616 (2018)). For assays that involved cell sorting, cells were transfected with a GFP expression plasmid and collected 4 days after transfection. A BD FACS Aria flow cytometer was used to sort cells and obtain flow cytometry data. Cells with the top 20% brightest GFP fluorescence were sorted by 5% increments into 4 bins. Cells were immediately harvested after sorting, as detailed below.

[0184] HEK293T genomic activation and RT-qPCR analysis. HEK293T cells were seeded at approximately 50,000 cells per well in a 24-well plate coated with poly-D-lysine 24 hours prior to transfection. Cells were co-transfected as described above, with the following VchCAST components: 100 ng pTnsAB_{f}, 50 ng pTnsC-VP64, 50 ng pTniQ, 50 ng pCas6, 250 ng pCas7, 50 ng pCas8, and 62.5 ng each of 4 targeting crRNAs for TIN, MIAT, and ASCL1 (or 83.3 ng each of 3 targeting crRNAs for ACTC1) (pCRISPR). In control experiments, cells were co-transfected with 100 ng of either pdCas9-VP64 or pdCas9-VPR plasmid, 62.5 ng each of 4 targeting sgRNAs for TTN (psgRNA), and a pUC19 plasmid to standardize transfected DNA amounts. Cells were harvested 72 hours after transfection using the RNeasy Plus Mini Kit (Qiagen), according to the manufacturer's instructions. cDNA was subsequently synthesized using the iScript cDNA Synthesis Kit (BioRad) using 1000 ng of RNA in a 20 uL reaction. Gene-specific qPCR primers were designed to amplify an approximately 180-250 bp fragment to quantify the RNA expression of each gene, and a separate pair of primers was designed to amplify ACTB (beta-actin) reference gene for normalization purposes.

[0185] qPCR reactions (10 μl) contained 5 μl of SsoAdvanced Universal SYBR Green Supermix (BioRad), 2 μl H₂O, 1 μl of 5 μM primer pair, and 2 μl of cDNA diluted 1:4 in H₂O. Reactions were prepared in 384-well white PCR plates (BioRad), and measurements were performed on a CFX384 Real-Time PCR Detection System (BioRad) using the following thermal cycling parameters: polymerase activation and DNA denaturation (98° C. for 2 min), 40 cycles of amplification (95° C. for 10 s, 60° C. for 30 s), and terminal melt-curve analysis (65-95° C. in 0.5° C. per 5 s increments). Each condition was analyzed using three biological replicates, and two technical replicates were run per sample. Normalized gene activation was calculated as the ratio of the 2-ΔCq of the targeting samples to the non-targeting samples, in which ΔCq is the Cq difference between the experimental gene primer pair and the reference gene primer pair.

[0186] Chromatin Immunoprecipitation. For ChIP-seq analysis experiments, HEK293T cells were seeded at approximately 1,500,000 cells per well in a 10 cm dish coated with poly-D-lysine 24 hours prior to transfection. Cells were co-transfected as described above with the following eCAST-1 components: 1.5 μg p3× FLAG-TnsC, 1.5 μg pTniQ, 1.5 μg pCas6, 7.5 μg pCas7, 1.5 μg pCas8, and 3 μg of either a targeting (TTN crRNA 1) or non-targeting crRNA. 72 hours after transfection, cells were harvested and pelleted by centrifugation at 300×g for 5 minutes, and the supernatant was aspirated. In brief, pellets were resuspended in 1% freshly made formaldehyde (Thermo Fisher Scientific in DPBS and shaken gently for 10 minutes. Fixation was quenched by adding 2.5 M glycine, for a final concentration of 125 mM glycine, and rotating cells for 5 minutes. Cells were pelleted, washed with cold DPBS, pelleted, resuspended in DPBS and 1× cOmplete EDTA free protease inhibitors (Sigma Aldrich), pelleted, flash frozen in liquid nitrogen, and stored at −80° C.

[0187] On the day of sonication, the cross-linked pellets were resuspended in 1 mL of Lysis Buffer 1 (50 mM HEPES-KOH, 140 mM NaCl, 1 mM EDTA, 10% glycerol, 0.5% NP-40, 0.25% Triton X-100) and 1× protease inhibitors and rotated for 10 minutes. Cells were pelleted at 1350 g for 5 minutes. Pellets were resuspended in 1 mL of Lysis Buffer 2 (10 mM Tris-HCl, 200 mM NaCl, 1 mM EDTA, 0.5 mM EGTA) and 1× protease inhibitors and rotated for 10 minutes before being pelleted at 1350 g for 5 minutes. Pellets were resuspended in 900 uL of Lysis Buffer 3 (10 mM Tris-HCl, 100 mM NaCl, 1 mM EDTA, 0.5 mM EGTA, 0.1% Na-Deoxycholate, 0.5% N-lauroylsarcosine), 100 uL of 10% Triton X-100, and 1× protease inhibitors. All steps took place at 4° C.

[0188] The resuspended cells were transferred to 1 ml milliTUBE AFA Fiber (Covaris) and sonicated on M220 Focused-ultrasonicator (Covaris) under the following SonoLab 7.2 settings: minimum temperature 4° C., set point 6° C., maximum temperature 7° C., Peak Power 75.0, Duty Factor 10.0, Cycles/Burst 200, sonication time 490 seconds. Sonicated cell lysate was centrifuged at 20,000 g for 10 minutes at 4° C. The supernatant was transferred to a new tube, and 5% was saved as the input sample. The remaining supernatant was incubated with Dynabeads Protein G (Thermo Fisher Scientific) that were bound to the monoclonal anti-Flag M2 antibody at a 1:8 dilution (Sigma-Aldrich) the day before sonication by overnight rotating at 4° C., and the lysate-Dynabead mixture was rotated overnight at 4° C.

[0189] The samples were washed three times each with low salt buffer (150 mM NaCl, 0.1% SDS, 1% Triton X-100, 1 mM EDTA, 50 mM Tris HCl), high salt buffer (550 mM NaCl, 0.1% SDS, 1% Triton X-100, 1 mM EDTA, 50 mM Tris HCl), and LiCl buffer (150 mM LiCl, 0.5% Na-deoxycholate, 0.1% SDS, 1% Nonidet P-40, 1 mM EDTA, 50 mM Tris HCl) on a magnetic stand at 4° C. The samples were washed with 1 mL of TE buffer (1 mM EDTA, 10 mM Tris HCl) with 50 mM NaCl and centrifuged at 960 g for 3 minutes at 4° C. The supernatant was aspirated and 210 μL of elution buffer (1% SDS, 50 mM Tris HCl, 10 mM EDTA, 200 mM NaCl) was added to samples and incubated for 30 minutes at 65° C. Samples were centrifuged for 1 minute at 16,000 g at room temperature, and 200 μL of supernatant was incubated overnight at 65° C. The input sample was diluted in 150 μL of elution buffer and also incubated overnight at 65° C. 0.5 μL of 10 mg/mL RNase was added, and samples were incubated for 1 hour at 37° C. 2 μL of 20 mg/mL Proteinase K were added, and samples were incubated for 1 hour at 55° C. The DNA was recovered by the QiaQUICK PCR Purification Kit (Qiagen) and DNA was eluted in 50 μL of water for downstream analysis.

[0190] ChIP-seq Sample Preparation. Sample DNA concentration was determined by the DeNovix dsDNA High Sensitivity Kit. Illumina libraries were generated using the NEBNext Ultra II Dna Library Prep Kit for Illumina (NEB). Sample concentrations were normalized such that 12 ng of DNA in each condition was used for library preparation. The concentration of DNA was determined for pooling using the DeNovix dsDNA High Sensitivity Kit. Illumina libraries were sequenced in paired-end mode on the Illumina NextSeq platforms with automated demultiplexing and adaptor trimming. For each ChIP-seq sample, 75-bp paired end reads were obtained and between 9.5 and 18.9 million uniquely mapped fragments were analyzed.

[0191] ChIP-seq analysis. ChIP-seq data were processed using CoBRA v2.0 with modifications as follows. Each experimental condition (TnsC with TTN-targeting gRNA or TnsC with non-targeting [NT] gRNA) was processed with three biological replicate ChIP samples and one corresponding non-immunoprecipitated input sample. Reads were aligned to the hg38 human reference genome using BWA-MEM with default settings. Reads were sorted and indexed using SAMtools, and multi-mapping reads with a MAPQ score<1 were removed using the samtools view command. Peaks were called using MACS2 v2.2.6. The callpeak function was executed in paired-end mode with the following parameters: −g 2.7e9 −q 0.0001—keep-dup auto—nomodel. Input samples were used as controls for peak calling. Bedgraph files for each sample with pileup information in signal per million reads (SPMR) were generated with the—SPMR and −B subcommands of MACS2 callpeak and were converted to bigwig files using bedGraphToBigWig. ChIP-seq signal at individual genomic loci was visualized with IGV. Reads mapping to the Y chromosome or the mitochondrial genome were removed prior to downstream analysis.

[0192] A consensus list of peaks for each experimental condition was identified using bedtools v2.30.0. First, peak files for the three replicates were concatenated and sorted and overlapping peaks were merged. Then, peaks appearing in fewer than three replicates were removed. Blacklisted regions of the genome defined by the ENCODE Consortium were also removed. The consensus lists for the conditions were then intersected to identify peaks exclusive to either condition (bedtools intersect −v) or peaks shared by both conditions (bedtools intersect −u). Differential binding analysis was performed using DiffBind v3.6.5 to compare ChIP-seq read density between the two conditions in the regions defined by their consensus peak lists. Reads were counted using dba.count with the following arguments: summits=F, bUseSummarizeOverlaps=T, bRemoveDuplicates=F, bSubControl=F. Read counts were normalized to account for differences in sequencing depth between samples. Normalized read counts were passed to DESeq2 to calculate the mean across conditions, as well as fold change and q-value (using the Benjamini-Hochberg procedure) between conditions, for each peak. The result of differential binding analysis was visualized using ggplot2.

[0193] Heatmaps of ChIP-seq signal intensity over peaks exclusive to the TTN gRNA condition were plotted using deepTools v3.3.2. Score matrices were generated using computeMatrix in reference-point mode. Peaks were sorted in descending order by mean signal over 2 kb windows around peak centers before plotting using plotHeatmap.

[0194] For manual inspection of potential off-target sites, a custom script was used to identify genomic loci with high similarity to the TTN spacer sequence. Other than the TTN locus itself, no loci with fewer than 5 mismatches were identified. TnsC ChIP-seq signal at the 5 most similar loci was visualized with IGV.

[0195] HEK293T integration assays. For assays in which plasmids were isolated and used to transform bacteria, HEK293T cells were transfected with requisite eCAST-1 expression plasmids, a pDonor that contained a non-replicative origin of replication (R6K), a pTarget plasmid, and a crRNA expression plasmid (pCRISPR) that either encoded a non-targeting crRNA or a crRNA targeting pTarget. 72 hours after transfection, cells were washed with PBS, harvested using TrypLE (Fisher Scientific), neutralized with culture media, and pelleted. After removal of supernatant, transfected plasmids were harvested using Qiagen Miniprep columns per the manufacturer's instructions, and further concentrated using the Qiagen MinElute column. Of this final purified plasmid mixture, 1 μl was used to electroporate NEB 10-beta electrocompetent E. coli cells (NEB) per the manufacturer's instructions. After recovery at 37° C., cells were plated onto LB-agar plates containing chloramphenicol. Chloramphenicol-resistant colonies were then replated onto LB-agar plates containing both chloramphenicol and kanamycin, and doubly-resistant colonies were harvested for genotypic analyses.

[0196] For all other integration assays, HEK293T cells were counted using a Countess 3 Cell Counter and seeded at 20,000 cells per well, unless otherwise specified, in a 24-well plate coated with poly-D-lysine 24 hours prior to transfection. Cells were transfected using plasmid DNA mixtures and 2 μl of Lipofectamine 2000, per the manufacturer's instructions. For eCAST-1 transposition assays, HEK293T cells were transfected with the following optimized VchCAST components, unless otherwise stated: 300 ng of pTnsAB_{f}, 25 ng of pTnsC, 100 ng each of pTniQ, pCas6, pCas7, pCas8, 200 ng of pDonor, 100 ng pTarget, and 100 ng of a targeting or non-targeting crRNA (pCRISPR). For eCAST-2 transposition assays, HEK293T cells were transfected with the following PseCAST components, unless otherwise specified: 200 ng of pTnsAB_{f}, 50 ng each of pTnsC, pTniQ, pCas6, pCas7, and pCas8, 200 ng of pDonor, and 100 ng of pTarget and a targeting or non-targeting crRNA (pCRISPR). When a QCascade polycistronic expression vector was used (pQCas), 75 ng was transfected. For eCAST-3 transposition assays, eCAST-2 conditions were used with pQCas, and 20 ng of pClpX was co-transfected as well (unless otherwise noted). All eCAST-3 transposition assays utilized puromycin selection (unless otherwise noted, see below for puromycin conditions), as constitutive ClpX expression led to visible toxicity independent of CAST machineries. Unless otherwise stated, cells were cultured for 4 days after transfection. Cells were washed with DPBS with no calcium or magnesium (Fisher Scientific), harvested using TrypLE (Fisher Scientific), and neutralized with culture media. 20% of the resuspended cells were pelleted by centrifugation at 300×g for 5 minutes, and the supernatant was aspirated. Cell pellets were resuspended in 50 μL of Quick Extract (Lucigen), and genomic DNA was prepared per the manufacturer's instructions.

[0197] For assays that utilized puromycin selection, HEK293T cells were transfected as described above with the addition of 20 ng of puromycin resistance expression plasmid as a transfection marker. Media was changed 24 hours after transfection, and selection with 1 μg/mL of puromycin was started. Cells were harvested using Quick Extract (Lucigen) per the manufacturer's instructions, either 4 days after transfection, or for timecourse experiments, beginning at 2 days after transfection until 6 days after transfection, with or without puromycin selection. For plasmid-based assays that utilized cell sorting, HEK293T cells were transfected with eCAST-2 components as described above with an additional 5 ng of GFP expression plasmid as a transfection marker. 4 days after transfection, the GFP positive cells with the brightest mean fluorescence intensity were sorted in 4 bins of 5% increments to encompass the 20% brightest cells and were immediately harvested as described above. For genomic assays that utilized cell sorting, HEK293T cells were seeded at approximately 100,000 cells in 6 well plates coated with poly-D lysine 24 hours before transfection. Cells were transfected with the following eCAST-3 components: 1000 ng each of pTnsAB_{f} and pDonor, 250 ng of pTnsC, 375 ng of polycistronic pCas7-Cas8-Cas6-TniQ, 20 ng of pGFP, 100 ng of pClpX, and 500 ng of a targeting crRNA (pCRISPR). 4 days after transfection, the top 20% of GFP positive cells with the brightest mean fluorescence intensity were sorted and immediately harvested, as described above. For genomic integration assays, cells were harvested by previously described assays, using 100 μl of freshly prepared lysis buffer (10 mM Tris-HCl, pH 7.5; 0.05% SDS; 25 μg/ml proteinase K (ThermoFisher Scientific) directly into each well of the tissue culture plate. The genomic DNA mixture was incubated at 37° C. for 1-2 h, followed by an 80° C. enzyme inactivation step for 30 min.

[0198] For assays that utilized cargo sizes ranging from 798 bp to 15 kb, HEK293T cells were transfected as described above with eCAST-2 component plasmids, except the 5 kb, 10 kb, and 15 kb pDonor plasmids were transfected in molar equivalents to the 798 bp pDonor (˜406 fmol), to account for the size difference between donor plasmids. For assays that utilized amplicon deep sequencing, HEK293T cells were transfected as described above, with a pDonor plasmid that contained a primer binding site immediately downstream of the right transposon end that matched a primer binding site present in the unedited pTarget plasmid. Cells were harvested 4days after transfection.

[0199] Nested PCR analysis of transposition assays. DNA amplification was performed by PCR using Q5 Hot Start High-Fidelity DNA Polymerase (NEB) following the manufacturer's protocol. In brief, PCR-1 1 μL of cell lysate was added to a 25 μL PCR reaction. Thermocycling conditions were as follows: 98° C. for 45 seconds, 98° C. for 15 seconds, 66° C. for 15 seconds, 72° C. for 10 seconds, 72° C. for 2 minutes, with steps 2-4 repeated 24 times. The annealing temperature was adjusted depending on primers used. 1 μL of the first PCR reaction served as the template for PCR-2, a 25 μL PCR reaction that was run under the same thermocycling conditions. Primer pairs contained one target-specific primer and one transposon-specific primer, and the primers used in the second PCR reaction generated a smaller amplicon than the first reaction. PCR amplicons were resolved by 1-2% agarose gel electrophoresis and visualized by staining with SYBR Safe (Thermo Scientific). Negative control samples were always analyzed in parallel with experimental samples to identify mis-priming products, some of which presumably result from the analysis being performed on crude cell lysates that still contain the pDonor and target-site DNA.

qPCR Analysis of Plasmid-to-Plasmid and Genomic Integration Products.
Transposition-specific qPCR primers were designed to amplify a ˜140-bp fragment to quantify integration efficiency. Primer pairs were designed to span the integration junction, with the forward primer annealing to pTarget, or the genome, and the reverse primer annealing within the transposon. Additionally, a custom 5′ FAM-labeled, ZEN/3′ IBFQ probe (IDT) was designed to anneal to each unique integration junction. A separate pair of primers and a SUN-labeled, ZEN/3′ IBFQ probe (IDT) were designed to amplify a distinct reference sequence in the target plasmid or the human genome, for efficiency calculation purposes.

[0200] Probe-based qPCR reactions (10 μL) contained 5 μL of TaqMan Fast Advanced Master Mix, 0.5 μL of each 18 μM primer pair, 0.5 μL of each 5 μM probe, 1 μL of H₂O, and 2 μL of ten-fold diluted cell lysate for plasmid-based transposition samples, or 2 μL of five-fold diluted cell lysate for genomic transposition samples. Reactions were prepared in 384-well white PCR plates (BioRad), and measurements were performed on a CFX384 Real-Time PCR Detection System (BioRad) using the following thermal cycling parameters: polymerase activation (95° C. for 10 minutes) and 50 cycles of amplification (95° C. for 15 seconds, 59.5° C. for 1 minute). Each condition was analyzed using either two or three biological replicates, and two technical replicates were run per sample. Baseline threshold ratios were manually adjusted to be 1:1 for the reference primer pair to the transposition primer pair. Integration efficiency was calculated as a percentage as 2^{-ΔCq} times 100, in which ΔCq is the Cq difference between the reference primer pair and the transposition primer pair.

[0201] To analyze the frequency of left-right insertion (T-LR) versus right-left insertion (T-RL) of the PseCAST transposon in plasmid-based assays, integration-specific qPCR primers were designed to span the T-LR integration junction, in addition to the primer pairs used for T-RL integration and the reference amplicon in the probe-based qPCR analysis described above. qPCR reactions (10 μL) contained 5 μl of SsoAdvanced Universal SYBR Green Supermix (BioRad), 2 μl H₂O, 1 μl of 5 μM primer pair, and 2 μl of ten-fold diluted cell lysate. Reactions were prepared in 384-well white PCR plates (BioRad), and measurements were performed on a CFX384 Real-Time PCR Detection System (BioRad) using the following thermal cycling parameters: polymerase activation and DNA denaturation (98° C. for 2 min), 50 cycles of amplification (95° C. for 10 s, 59.5° C. for 20 s), and terminal melt-curve analysis (65-95° C. in 0.5° C. per 5 s increments). Each condition was analyzed using three biological replicates, and two technical replicates were run per sample.

[0202] ddPCR analysis of integration products. During harvesting of HEK293T plasmid-based integration assays, 50% of the resuspended cells were reserved during lysate generation. 500 μL of resuspended cells were pelleted by centrifugation at 300×g for 5 minutes. The supernatant was aspirated, and DNA was extracted from cell pellets using the Qiagen DNeasy Blood and Tissue Kit (Qiagen). DNA was eluted in H₂O and diluted to a concentration of 2.5 ng/μL. For genomic integration assays, crude cell lysate, generated as described above, was purified using two-sided AMPure XP beads (Beckman Coulter) as follows: 45 μL of AMPure XP beads were added to 20-80 μL of genomic lysate and incubated for 5 minutes before being placed on a magnetic PCR rack for 5 minutes. The supernatant was aspirated, and the beads were washed twice with 80% ethanol. The beads were dried for 5 minutes, then 25 μL of water was added to resuspend the beads. The suspension was incubated for 10 minutes off the magnetic rack, then placed back on the rack for 5 minutes. The supernatant was transferred to a new tube.

[0203] ddPCR was performed with the same primers and probes as for plasmid-to-plasmid integration analysis and genomic integration assays with the exception of the OXA1L-2 target site, which was not quantified via qPCR. Plasmid-based ddPCR reactions (20 μL) contained 10 μL of ddPCR Supermix for Probes (Biorad), 1 μL of each 5 μM probe, 1 μL of each 18 μM primer pair, 5 units of HindIII (NEB), 4.13 μL of H₂O, and 2 μL of 2.5 ng/μL DNA. Genomic ddPCR reactions (20 μL) contained 10 μL of ddPCR Supermix for Probes (Biorad), 1 μL of each 5 μM probe, 1 μL of each 18 μM primer pair, 5 units of HindIII (NEB), and 6.33 μL of purified DNA, ranging from ˜6 ng to ˜500 ng. Reactions were assembled at room temperature, and droplets were generated using the Biorad QX200 Droplet Generator according to the manufacturer's instructions. Thermocycling was performed on a Biorad C1000 Touch Thermocycler with the following parameters: enzyme activation (95° C. for 10 minutes), 40 cycles of amplification (94° C. for 30 second, 61.5° C. for 1 minute) and enzyme deactivation (98° C. for 10 minutes). After thermocycling, droplets were hardened at 4° C. for 2 hours. Droplets were analyzed using the QX200 Droplet Reader according to the manufacturer instructions. Integration percentages were calculated as the number of FAM positive molecules divided by the number of SUN/VIC positive molecules times 100.

[0204] Amplicon sequencing strategy to quantify integration efficiencies. To improve sensitivity of genomic integration assays in human cells, an NGS-based approach was designed in which both unedited sites and integration products are simultaneously amplified in a single PCR reaction (FIG. 14B). PCR-1 products were generated as described for PCR-1 in the nested PCR analyses, except primers contained universal Illumina adaptors as 5′ overhangs and the cycle number was reduced to 15 for plasmid-to-plasmid integration assays, and 25 for genomic integration assays. Additionally, up to 5 degenerate nucleotides were placed between the primer binding site and the Illumina adaptor 5′ overhang to improve library diversity when sequencing. 1 μl of lysate per 10 μl of overall PCR reaction was used; plasmid-to-plasmid integration assays were 20 μl PCR reactions, while genomic integration assays were 250 μl PCR reactions to sample sufficient alleles. These products were then diluted 20-fold into a fresh polymerase chain reaction (PCR-2) containing indexed p5/p7 primers and subjected to 10 additional thermal cycles using an annealing temperature of 65° C. After verifying amplification by analytical gel electrophoresis, barcoded reactions were pooled and resolved by 2% agarose gel electrophoresis, DNA was isolated by Gel Extraction Kit (Qiagen), and NGS libraries were quantified by qPCR using the NEBNext Library Quant Kit (NEB). Illumina sequencing was performed using the NextSeq platform with automated demultiplexing and adaptor trimming (Illumina).

[0205] To determine integration efficiencies and distributions, reads were filtered that contained the expected 10-bp sequence immediately downstream of the forward primer, to verify that they derived from the target site. Next, reads containing a 10-bp transposon end sequence were counted as “integration reads,” and the integration distance was calculated from the start of the transposon end to the PAM-distal end of the target sequence. Reads that instead contained a 10-bp sequence from the unedited site at the end of the read were counted as “unedited reads.” The integration efficiency, or “integration reads (%)”, as marked in FIGS. 5B-5G, was calculated as the number of “integration reads” divided by the sum of both “integration reads” and “unedited reads”, converted to a percentage. Histograms of integration distances were plotted by compiling distances across all reads within a given sample.

[0206] Data availability. Sequencing data has been deposited in the National Center for Biotechnology Information Sequence Read Archive under GEO accession GSE223174.

### Example 1

### Identification of a Bacterial Factor Involved in RNA-Guided DNA Integration

[0207] Previously, a diverse set of CAST systems that encode nuclease-deficient type I-F CRISPR-Cas systems were identified and shown to catalyze RNA-guided DNA integration into extra-chromosomal (e.g., plasmid) DNA targets in human cells at varying efficiencies. A specific CAST system derived from Tn7016 in Pseudoalteromonas sp. S983, referred to as PseCAST, exhibited RNA-guided DNA integration at plasmid target sites at efficiencies ranging from roughly 0.5-5%, whereas the efficiencies for RNA-guided DNA integration at genomic target sites ranged from 0.01% to 0.1%, as shown in FIG. 19A. This discrepancy between efficiencies observed at plasmid versus genomic targets could be explained by a number of possible factors, including, but not limited to, the copy number of the target site, the chromatin state (e.g., whether the DNA is occluded by nucleosomes or not), the topology of the DNA (e.g., supercoiling), the cellular localization of the substrate, and the sequence complexity of the DNA substrate, among other possible explanations, as outlined in FIG. 19B.

[0208] Another potential difference could involve the extent to which integration product intermediates are recognized and acted upon by endogenous DNA repair proteins, to complete the entire editing reaction and generate resolved integration products (FIG. 20). Tn7-like CAST systems, specifically those that also encode a TnsA endonuclease protein, catalyze cut-and-paste transposition that leaves DNA double-strand breaks behind on the donor DNA molecule after excision, and generates gapped intermediate products at the target site after the strand-transfer reaction, which covalently joins the 3′-hydroxyl ends of the excised (mini)-transposon DNA substrate with the target DNA at a 5-bp staggered site. Excision of the (mini)-transposon DNA from the donor DNA molecule requires enzymatic activity of both TnsA (endonuclease) and TnsB (DDE-family transposase), whereas the strand-transfer reaction requires only the TnsB proteins. Importantly, two monomers must both catalyze reactions concurrently to join both ends of the inserted DNA with the target site. The initial intermediate products then contain 5-nt gaps on both sides of the inserted DNA, which must be filled in by a DNA polymerase enzyme, followed by a ligation reaction, to complete the overall DNA integration (e.g., transposition) pathway. This pathway ultimately yields simple-insertion DNA products, which are characterized by hallmark 5-bp target-site duplications (TSDs) that are a consequence of the 5-nt gap fill-in reaction that occurs on both ends of the inserted DNA. Importantly, gap fill-in requires disassembly of the post-strand transfer transpososome complex, in order to render the DNA accessible to DNA polymerase and ligase for completion of the terminal reaction steps.

[0209] pcDNA3.1-derivated plasmids that encode an NLS-tagged ClpX protein, which was subcloned from the genome of E. coli BL21 (DE3) strain, were generated to enable robust expression and nuclear localization of EcoClpX in human cells (DNA and protein sequences can be found in Tables 1 and 2). HEK293T cells were co-transfected with ClpX expression plasmids, along with all required machinery for PseCAST to carry out RNA-guided DNA integration. crRNAs targeting either plasmid or genomic target sites for RNA-guided DNA integration were expressed, and integration activity was quantified using a next-generation sequencing (NGS)-based approach, in which unedited and edited (DNA-inserted) alleles are amplified using the same set of primers, due to the presence of a genomic primer binding site within the mini-transposon cargo. An approximate 100× increase in integration efficiencies was observed at genomic target sites in the presence of EcoClpX, whereas integration efficiencies at ectopic plasmid target sites exhibited little change with the addition of ClpX (FIG. 5E).

[0210] The impact of ClpX on CAST-mediated DNA integration into genomic target sites was investigated by titrating the amount of ClpX expressed in the host cell. The amount of ClpX-expression plasmid was serially increased from 0 ng to 100 ng, as shown in FIG. 21, and the seeding density of cells was modulated approximately 20-24 hours prior to transfection. A dose response was observed in the editing efficiency at genomic target sites as a function of ClpX expression plasmid amount, where integration efficiency increased as more plasmid was transfected, until the effect was saturated at 100 ng. The ability for ClpX to increase genomic integration efficiencies was investigated by targeting multiple loci across the genome, and comparing integration efficiencies in the presence and absence of ClpX. As shown in FIG. 22, ClpX universally improved genomic integration efficiencies; this increase was between approximately 10- and 600-fold.

[0211] ClpX is part of a large multi-protein degradation pathway in bacteria, which also involves other proteins including ClpA, ClpB, and ClpP. ClpP is a large, tetradecameric subunit peptidase, which has no intrinsic protein specificity. ClpP can form a proteolytic complex with either ClpA or ClpX. ClpA recognizes substrates with abnormal N-termini sequences, while ClpX recognizes C-termini motifs, such as the SsrA sequence. ClpB has approximately 80% sequence identity to ClpA, but is an AAA+ ATPase chaperone that functions independent of ClpP. In order to determine whether ClpX was specifically involved in enhancing RNA-guided DNA integration at genomic target sites in mammalian cells, or if other members of this multi-protein degradation pathway could also similarly act as accessory factors, similar experiments as those described above were performed, but ClpX was substituted with either ClpA, ClpB, ClpP, or a combination of both ClpX and ClpP simultaneously. As shown in FIG. 5G, genomic integration efficiencies were only improved in the presence of ClpX, but not ClpA or ClpB, and the additional presence of ClpP did not further impact genomic integration efficiencies. These results indicate that the unfoldase activity of ClpX, but not the proteolytic activity of ClpP, is sufficient to enhance the integration efficiency of CAST systems in mammalian cells. This enhancement may be due to the specific unfolding and active disassembly of post-transposition complexes, thereby rendering the DNA integration intermediate product accessible to enzymes for gap fill-in and ligation and may indicate the presence of protein-protein interactions between ClpX and one or more components of CAST systems present in the post-strand transfer (e.g., post-transposition) complex.

[0212] The described above demonstrated an enhancement of RNA-guided DNA integration at genomic target sites using ClpX derived from the E. coli BL21(DE3) genome. However, CAST systems referred to here as PseCAST and VchCAST are derived from species that are not within the Escherichia genus, and derive instead from a Pseudoalteromonas genus and Vibrio cholerae, respectively. In some embodiments, the native ClpX from the species matched with the particular CAST system is instead used to enhance RNA-guided DNA integration activity, such that the ClpX derives from a cellular environment where it may have co-evolved more closely with the components from the CAST system. Human codon-optimized (hCO) DNA fragments were cloned that encode ClpX proteins from both Pseudoalteromonas sp. and Vibrio cholerae into pcDNA3.1-like vectors, and they were co-transfected with PseCAST and VchCAST, respectively. As shown in FIG. 16B, PseCAST and VchCAST exhibited enhanced genomic integration efficiencies with both E. coli derived ClpX (EcoClpX) and with their respective native ClpX proteins (PseClpX and VchClpX, respectively). Notably, VchCAST exhibited near-undetectable integration efficiencies in the absence of ClpX altogether, whereas in the presence of ClpX, integration efficiencies were enhanced to detectable levels of ˜0.01%.

[0213] EcoClpX was tested in combination with a more conventional gene editing system, namely SpyCas9 together with a sgRNA, in order to determine whether the enhancement effect of ClpX is specific to CAST, or whether there is some more general, non-specific enhancement activity. When the AAVS1 locus within intron 1 of the PPP1R12C gene was targeted for standard gene editing with CRISPR-Cas9, using amplicon-sequencing to determine editing efficiencies as measured by the frequency of indel reads compared to wild-type (unedited) reads, EcoClpX failed to enhance the observed editing efficiencies for CRISPR-Cas9 (FIG. 23). Rather, there was a minor ˜2× decrease in editing efficiency, possibly due to squelching effects or impacts on cellular fitness as a consequence of ClpX expression.

### Example 2

### Investigating TnsB-ClpX Interactions Via Plasmid and Genomic Integration Assays

[0214] The specific interactions between ClpX and component(s) of Type I-F CAST systems are unknown. PseCAST is active for targeted integration at both episomal plasmid DNA and genomic DNA sites in the absence of ClpX protein, and the addition of ClpX selectively enhances integration efficiency at genomic target sites, but not plasmid DNA sites.

[0215] A panel of sequence truncations of PseTnsB beginning from the C-terminus was generated and the efficiency of integration into plasmid target sites for each truncation mutant was tested. As shown in FIG. 24, introducing even a 4-aa truncation at the C-terminus of TnsB resulted in a complete loss of plasmid-based integration activity, suggesting that these residues are involved in some aspect of the integration reaction that is independent of ClpX.

### Example 3

### Heterologous Expression of CAST Components in Human Cells

[0216] To establish whether the component parts of Type I-F V. cholerae CAST (VchCAST; previously also referred to as VchINTEGRATE) were efficiently expressed, each protein-coding gene was cloned onto a standard mammalian expression vector with an N- or C-terminal nuclear localization signal (NLS) and 3× FLAG epitope tag (FIG. 1B). Using Western blotting, robust heterologous protein expression was shown both individually and when all CAST proteins were co-expressed (FIG. 1C). Cellular fractionation provided evidence of nuclear trafficking, and efficient expression and trafficking of an engineered TnsAB fusion protein (TnsAB_{f}) that retains wild-type activity was also demonstrated (FIG. 6). However, initial attempts to reconstitute RNA-guided DNA integration in HEK293T cells proved unsuccessful, even after exploring numerous strategies to enrich rare events through both positive and negative selection. To separately assess guide RNA expression a previously developed approach (See, Chen, Y. et al. Nat. Commun. 11, 1-4 (2020)). was adapted to monitor crRNA biogenesis within the 5′ untranslated region (UTR) of a GFP-encoding mRNA. Cas6 is a ribonuclease subunit of Cascade that cleaves the CRISPR repeat sequence in most Type I CRISPR-Cas systems, which would sever the 5′ cap from the GFP open reading frame and thus lead to fluorescence knockdown (FIG. 1D). Accordingly, a near-total loss of GFP fluorescence was observed when the reporter plasmid was co-transfected with cognate VchCas6, but not when the reporter encoded a non-cognate CRISPR repeat or lacked a repeat altogether (FIG. 1E). Interestingly, GFP knockdown was substantially reduced when Cas6 contained a C-terminal NLS or 2A peptide (FIG. 1E), indicating a sensitivity to terminal tagging that could not be explained by the cryoEM structure (see below).

### Example 4

### QCascade and TnsC Function as Transcriptional Activators

[0217] Unlike most Type II and V CRISPR-Cas systems, which encode single-effector proteins that function as RNA-guided DNA nucleases (Cas9 and Cas12, respectively), the Cascade complex encoded by Type I systems does not possess DNA cleavage activity and instead exhibits long-lived target DNA binding upon R-loop formation, analogously to catalytically inactive Cas9 (dCas9). This activity was leveraged for transcriptional activation of an mCherry reporter gene by fusing transcriptional activators to QCascade, thereby converting DNA binding into a detectable signal that would allow facile troubleshooting and optimization of QCascade function (FIG. 7A).

[0218] Activators using a Type I-E Cascade unrelated to transposons from Pseudomonas sp. S-6-2 (PseCascade_IE) were constructed. VP64 was fused to the hexameric Cas7 subunit and all five cas genes were concatenated within a single polycistronic vector downstream of a CMV promoter, by linking them together with virally derived 2A ‘skipping’ peptides; the crRNA was separately expressed from a U6 promoter (FIG. 7A). The resulting expression plasmids yielded ˜260-fold mCherry activation when co-transfected with the reporter plasmid, similar to levels achieved with dCas9-VPR, and the effect was ablated in the presence of a non-targeting crRNA (FIG. 2B). Surprisingly, nearly identical designs using the transposon-encoded Type I-F QCascade homolog from V. cholerae, failed to result in detectable activation (FIGS. 2A-2B).

[0219] To systematically investigate if presence of N-terminal NLS tags, C-terminal 2A tags, or both, might be inhibiting QCascade assembly and/or RNA-guided DNA targeting, peptide tags were cloned onto the termini of all VchCAST components and their impact was tested in E. coli transposition assays. While some tags had little effect on activity, others led to a severe reduction or complete loss of targeted DNA integration (FIG. 7C). The transposase components were particularly vulnerable, with an N-terminal tag on TnsA and C-terminal tags on TnsB and TnsC being largely prohibitive. Within the context of QCascade, C-terminal 2A tags on TniQ and Cas7 each reduced integration by >90%, which could explain the lack of transcriptional activation observed using polycistronic vector designs. Multiple components were screened for activator fusions and the N-terminus of Cas7 was amenable to both VP64 and VPR fusions in bacteria (FIG. 7D).

[0220] QCascade-VP64 was tested in human cells using individual expression vectors with optimized NLS tag locations for each component, and mCherry activation was detected for two distinct crRNAs, evidencing successful assembly and target binding in human cells (FIGS. 2C, 2D and 7E). Activation levels were further increased by replacing all monopartite SV40 NLS tags with bipartite (BP) NLS tags, and this activity was dependent on the simultaneous expression of Cas8, Cas7, Cas6, and a targeting crRNA (FIGS. 2D, 7E-7F). Interestingly, although Cas7 tolerated a VPR fusion in bacteria, transcriptional activation was unable to be detected in mammalian cells using VPR-Cas7 (FIGS. 2D, 7D-7E).

[0221] Multivalent assembly of TnsC may be used to increase the potency of transcriptional activation in mammalian cells, while also demonstrating recruitment of a critical transposase component in a QCascade-dependent fashion (FIG. 2E). VP64 was fused to either the N- or C-terminus of TnsC, seven candidate sites upstream of the mCherry reporter gene were targeted (FIG. 8A), and the potential for TnsC to stimulate transcriptional activation was investigated. Strikingly, TnsC-VP64 activators drove substantially higher levels of mCherry activation than QCascade alone, and activation levels could be further improved by optimizing the relative amount of each expression plasmid used during transfection (FIGS. 2F, 8B). This effect was absent when TniQ was omitted or an E. coli TnsC homolog was substituted, confirming the importance of cognate TniQ-TnsC interactions. Furthermore, a TnsC ATPase mutant that prevents oligomer formation (E135A) also abolished transcriptional activation, suggesting that the observed signal requires protein oligomerization on DNA (FIG. 2F). Non-targeting controls generated undetectable mCherry MFI above background levels, demonstrating the specificity of potential TnsC filamentation in Type I-F CASTs (FIG. 2F). When probing the specificity of QCascade DNA binding, intermediate levels of transcriptional activation were retained when mismatches were tiled within the middle of the 32-bp target site, but there was a reliance on cognate pairing in the seed (positions 1-8) and PAM-distal (positions 25-32) regions (FIG. 2G).

[0222] Four endogenous genes in the human genome (TTN, MIAT, ASCL1, and ACTC1), which have been previously targeted with CRISPRa using dCas9-VPR, were targeted. Three or four distinct crRNAs tiled upstream of the transcription start site were designed and delivered by either transfecting a single crRNA expression plasmid, co-transfecting multiple crRNA expression plasmids, or transfecting a single crRNA expression plasmid containing a four-spacer CRISPR array (FIG. 3A, 8C, 8D). TTN induction by TnsC-VP64 was comparable to dCas9-VP64 and dCas9-VPR activation, and the presence of Cas8 and TniQ facilitated induction (FIG. 3A). Potent activation was seen on other genomic targets ranging from 200-fold (MIAT) to >1000-fold (ASCL1), highlighting the programmability of the multimeric system (FIG. 3A), though other sites showed more moderate activation (FIG. 8E). Furthermore, the ability to utilize a multiplexed CRISPR array containing four spacers that each targeted a different gene to achieve robust transcriptional activation of all 4 genes (TTN, MIAT, ASCL1, and ACTC1) in the same cell population was demonstrated at levels comparable to activation achieved by single spacer CRISPR arrays (FIGS. 3B and 3C).

[0223] The fidelity of TnsC recruitment was investigated by performing ChIP-seq after co-transfecting plasmids encoding FLAG-tagged TnsC, protein components of QCascade, and a TTN-specific crRNA. Analysis of the resulting data revealed a sharp peak directly upstream of the TTN transcriptional start site (TSS) at the expected target site, which was absent in non-targeting (NT) samples transfected with a crRNA containing a spacer not found in the human genome (FIGS. 3D, 9A, 9B). To assess off-target binding, all peaks in both targeting and non-targeting conditions were analyzed across three biological replicates and differential binding analysis was performed, revealing only a single region at the TTN promoter that exhibited significantly different binding affinity between both conditions (FDR<0.05), highlighting the specificity of Type I-F CAST assembly (FIGS. 3E and 9C). Heatmap analysis of additional peaks that were called in either targeting or non-targeting conditions revealed low enrichment values, and a further manual inspection of 5 potential off-target sites that exhibited high similarity to the TTN spacer sequence lacked any detectable signal enrichment in the ChIP-seq datasets (FIG. 9D-9G). These results indicate that TnsC binds target sites marked by QCascade with high-fidelity, and that the intrinsic ability of TnsC to form ATP-dependent oligomers enables multiple copies of an effector protein to be delivered to genomic sites targeted by a single guide RNA.

[0224] This programmable, multivalent recruitment represents an exciting opportunity to further develop genome and transcriptome engineering tools that benefit from RNA-guided DNA binding of an effector ATPase. In the context of efforts to reconstitute CAST systems, TnsC-mediated transcriptional activation provided compelling evidence that both CRISPR- and transposon-associated protein components can be functionally assembled at plasmid and genomic target sites in a highly specific and programmable manner.

### Example 5

### RNA-Guided Episomal DNA Integration in Human Cells

[0225] A promoter-driven chloramphenicol resistance cassette (CmR) was cloned within the mini-transposon of a donor plasmid (pDonor) and then the same sequence on the mCherry reporter plasmid (pTarget) that was used in transcriptional activation experiments was targeted. Upon successful transposition in HEK293T cells, integrated pTarget products will carry both CmR and KanR drug markers and can thus be selected for by transforming E. coli with plasmid DNA isolated from transfected cells (FIG. 4A). Importantly, a pDonor backbone that cannot be replicated in standard E. coli strains was used, reducing background from unreacted plasmids. A TnsAB fusion protein (TnsAB_{f}) that contains an internal bipartite NLS and maintains wild-type activity in E. coli was used (FIG. 6C), thereby reducing the number of unique protein components; this modified system is hereafter referred to as engineered CAST-1 (eCAST-1).

[0226] After transfecting HEK293T cells with pDonor, pTarget, and all protein-RNA expression plasmids, purifying the plasmid mixture from cells, and using the mixture to transform E. coli, the emergence of colonies that were chloramphenicol resistant was observed, which outnumbered the corresponding colonies obtained from experiments using a non-targeting crRNA that did not match pTarget (FIG. 10A). Junction PCR was performed on select colonies and bands of the expected size were obtained, which subsequent Sanger sequencing confirmed were integration products arising from DNA transposition 49-bp downstream of the target site (FIG. 4B), as expected. Further analyses of individual clones revealed the expected junction sequences across both the transposon left and right ends (FIG. 10B). The same products could be detected by nested PCR directly from HEK293T cell lysates (FIG. 10C), and a sensitive TaqMan probe-based qPCR strategy was used to quantify integration events from lysates by detecting site-specific, plasmid-transposon junctions (FIG. 10D). Using this approach, an initial optimization screen was performed by varying the relative amounts of expression and pDonor plasmids and efficiencies were greatest with low levels of pTnsC and high levels of pTnsAB_{f} and pDonor (FIG. 10E). Absolute efficiencies of plasmid-to-plasmid integration with this eCAST-1 system from V. cholerae remained <0.1%.

[0227] The bioinformatic mining and experimental characterization of 18 new Type I-F CRISPR-associated transposons (denoted Tn7000-Tn7017), many of which exhibited high-efficiency and high-fidelity RNA-guided DNA integration in E. coli (FIG. 4c), was used in a hierarchical screening approach to uncover variants with improved activity in human cells (FIG. 11A). Briefly, the screening approach involved filtering based on robust activity in three key areas: (i) crRNA biogenesis by Cas6, assessed using the GFP knockdown assay; (ii) transposon DNA binding by TnsB, assessed using a tdTomato reporter assay; and (iii) transcriptional activation by TnsC-VP64, assessed using the mCherry reporter assay. In all cases, genes were human codon optimized, which often facilitated achieving strong expression (FIG. 11B), and tagged with NLS sequences on the same termini as for Tn6677 (VchCAST). The majority of systems exhibited efficient crRNA biogenesis and transposon DNA binding activity that was similar to that observed with Tn6677 (FIGS. 11C-11D). Interestingly, of those systems selected for testing in transcriptional activation experiments, only Tn7016 showed reproducible induction of mCherry expression, albeit at levels ˜8-fold lower than Tn6677 (FIG. 11E).

[0228] After verifying that fusing TnsA and TnsB from Tn7016, a 31-kb transposon from Pseudoalteromonas sp. S983 (PseCAST), and with an internal NLS retained function, and optimizing the length of left and right transposon ends (FIGS. 12A-12B), plasmid-to-plasmid transposition assays were repeated in HEK293T cells. Strikingly, the engineered Pseudoalteromonas CAST (eCAST-2.1) was ˜40-fold more active than eCAST-1 when tested under unoptimized conditions (FIGS. 4D and 12C). To further improve integration efficiencies, the design of the crRNA, location of NLS tags, and relative amounts of each expression plasmid were systematically varied; the resulting eCAST-2.2 yielded a further ˜6-fold improvement to reach levels of 3-5% integration, and PCR followed by Sanger or Illumina sequencing analysis confirmed the expected site of integration 49-bp downstream of the target (FIGS. 4E, 4F, and 12D-12H). Of note, these efficiencies were comparable to integration efficiencies achieved with BxbI under similar plasmid-to-plasmid conditions (FIG. 12I). Peak integration occurred 4-6 days post-transfection, with the efficiency exhibiting sensitivity to both cell density and the choice of cationic lipid delivery method (FIGS. 13A-13C). The observed integration efficiency was increased by >5-fold upon co-transfection of a GFP transfection marker and separately analyzing sorted cells exhibiting high GFP fluorescence levels, suggesting that activity was dependent not only the stoichiometry of the transfected plasmids but also the plasmid dosage across the population of cells (FIGS. 13D-13E).

[0229] Integration was dependent on a targeting crRNA and the presence of all protein components, including an intact TnsB active site (FIG. 4G), and functioned with genetic payloads spanning 1-15 kb in size, albeit with a ˜3-fold decrease in efficiency with larger payloads (FIG. 4H). A panel of mismatched crRNAs was generated in which mutations were tiled along the length of the 32-nt guide, and activity was ablated regardless of the location (FIG. 4I), indicating a greater degree of discrimination than that observed in activation experiments utilizing VchCAST in activation experiments or in E. coli. An alternative qPCR approach was used to confirm that integration orientation for eCAST-2.2 was highly biased towards T-RL, as expected from prior bacterial integration data (FIG. 14A). An NGS-based amplicon sequencing approach was used to quantify all integration events at the expected insertion site (FIGS. 14B-14C) and droplet digital PCR (ddPCR) corroborated the quantitative data obtained from TaqMan qPCR (FIG. 14D).

### Example 6

### RNA-Guided Episomal DNA Integration in Human Cells

[0230] A panel of guide sequences targeting the AAVS1 safe-harbor locus were screened via a plasmid-to-plasmid integration assay, in which 32-bp target sites derived from AAVS1 were cloned into pTarget and existing assays were leveraged to identify two active crRNAs that outperformed the original plasmid-specific crRNA (FIG. 15A). When the AAVS1 locus was tested for genomic integration using a nested PCR strategy, RNA-guided DNA integration products were identified that again maintained the expected 49-bp distance dependence from the target site (FIG. 5A). However, detection was often not consistent across biological replicates, suggesting that integration efficiencies were near the limit of detection. An NGS-based amplicon sequencing method established in the prior plasmid-based assays yielded reproducible efficiencies on the order of ˜0.005% (FIGS. 5B and 14B).

[0231] An additional 8 sites were targeted across the genome, with 1-3 crRNAs per locus, and detected integration at efficiencies that varied but were generally ˜0.01% (FIG. 5C). Attempts to increase the efficiency further through simplified delivery of a polycistronic QCascade expression vector, serial additions of extra NLS sequences, constitutive expression of the targeting machinery, inclusion of bacterial IHFa/b, or phenotypic drug selection to enrich for integration events (FIGS. 15B-15F) did not reduce the large, 100-1,000× discrepancy between observed integration efficiencies at plasmid and genomic target sites. Although differences in chromatinization remained a distinct possibility. Without being bound by theory, the discrepancy might be due to potential toxicity of genomic integration intermediate products.

[0232] To test if CAST systems might utilize bacterial ClpX, or some other accessory factor, for active mechanical disassembly of the PTC, human cells were co-transfected with eCAST-2.2 components and a plasmid expressing NLS-tagged E. coli ClpX (EcoClpX), collectively referred to as eCAST-3. Remarkably, genomic integration efficiencies increased by ˜100× in a ClpX dose-responsive manner, albeit with observable ClpX-induced cellular toxicity, whereas plasmid integration efficiencies were unaffected (FIGS. 5E and 5F). To investigate if the effect was specific to ClpX, other bacterial unfoldases were tested, including ClpA and ClpB, and found that ClpX was the only tested ATPase that enhanced genomic integration. ClpP, which functions as the peptidase component within the ClpXP protease complex, had no effect on integration, either alone or in combination with ClpX, suggesting that protein unfolding, but not protein degradation, is sufficient (FIG. 5G). When point mutations that ablate ATP hydrolysis (E185Q or R370K) or substrate engagement (Y153A) were introduced, ClpX failed to enhance genomic integration (FIG. 16A), further supporting the mechanistic link between ATPase-driven protein unfolding and PTC disassembly. ClpX is highly conserved across bacterial species, and the homolog from Pseudoalteromonas (80% amino acid identity) also stimulated integration, albeit to a slightly lesser extent that EcoClpX (FIG. 16B); NLS-tagged human ClpX, which normally functions in the mitochondria, had no effect on integration (FIG. 16C). Interestingly, genomic integration with eCAST-1 (VchCAST) was reproducibly detectable in the presence of EcoClpX or VchClpX but not in its absence, indicating a consistent effect across Type I-F CAST systems, though lower intrinsic activity of VchCAST was observed similar to plasmid-to-plasmid integration assays (FIG. 16B). Collectively, these results suggest that PTC disassembly may be a bottleneck limiting integration into genomic target sites, and identify ClpX as an accessory factor that acts to unfold one or more components within the CAST transpososome (FIG. 16D

[0233] Single-digit genomic integration efficiencies at the AAVS1 locus allowed exploration of other parameters of eCAST-3 design and delivery. crRNAs functioned best with 33-nt spacers on both plasmid and genomic targets (FIGS. 17A-17B), and that transfections could be simplified by placing the U6-driven crRNA cassette directly on pDonor without an adverse effect on activity (FIG. 17C). Integration could be further improved with the appropriate selection of cationic lipid formulation (FIG. 17D), or by selecting/sorting cells that were co-transfected with either a drug or fluorescent marker, with efficiencies reaching ˜5% as measured by amplicon-sequencing and ddPCR (FIGS. 5H and 17E-17F). Inspection of the next-generation sequencing data revealed an absence of indels above background (˜0.04% sequencing error) at unedited target sites, and an absence of detectable mutations surrounding genome-transposon junctions (FIG. 17G), suggesting that CAST systems are less prone to the range of byproducts common to Cas9 nuclease and nickase-based approaches.

[0234] Lastly, previously targeted sites across the human genome were revisited and assessed for integration efficiency to test the generalizability of ClpX enhancement (FIG. 18A). Strikingly, a 10-600-fold increase in integration efficiencies was observed across all tested loci (FIG. 5I), with a consistent preference for insertions ˜49-bp downstream of the crRNA-matching target site (FIG. 18B), as first reported in E. coli studies.

TABLE 1
Sequence and description of plasmids

| | | SEQ |
|---|---|---|
| | | ID |
| Plasmid ID | Plasmid description | NO |
| pSL0341 | pTarget | 12 |
| pSL0454 | Pse Cascade VP64-Cas7 | 13 |
| pSL0532 | Pse I-E Targeting crRNA | 14 |
| pSL0534 | Pse I-E NT crRNA | 15 |
| pSL2276 | Pse I-E_DR-eGFP | 16 |
| pSL2277 | Tn6677_DR-eGFP | 17 |
| pSL2279 | Pse I-E pCas6 | 18 |
| pSL812 | Vch stuffer crRNA | 19 |
| pSL2620 | Vch pTniQ | 20 |
| pSL2621 | Vch pCas8 | 21 |
| pSL2622 | Vch pCas7 | 22 |
| pSL2623 | Vch pCas6 | 23 |
| pSL2645 | Vch pTnsC | 24 |
| pSL2669 | Vch pTnsABf | 25 |
| pSL2693 | Vch pVP64-Cas7 | 26 |
| pSL2783 | Vch pTnsC-VP64 | 27 |
| pSL3617 | Pse stuffer crRNA | 28 |
| pSL2912 | Pse pTniQ | 29 |
| pSL2913 | Pse pCas8 | 30 |
| pSL2914 | Pse pCas7 | 31 |
| pSL2915 | Pse pCas6 | 32 |
| pSL3718 | PseQCascade | 33 |
| pSL3713 | Pse pTnsC-3xNLS | 34 |
| pSL3402 | Pse pTnsA-NLS-Bf | 35 |
| pSL3626 | Vch pDonor | 36 |
| pSL3637 | Pse pDonor | 37 |
| pSL3927 | Pse pDonor | 38 |
| pSL3744 | Pse pDonor | 39 |
| pSL3936 | Pse pDonor | 40 |
| pSL4103 | Pse pDonor | 41 |
| pSL4575 | Pse pDonor | 42 |
| pSL3815 | Pse pDonor | 43 |
| pSL4070 | Pse pDonor | 44 |
| pSL4071 | Pse pDonor | 45 |
| pSL4072 | Pse pDonor | 46 |
| pSL4762 | Pse pDonor | 47 |
| pSL4763 | Pse pDonor | 48 |
| pSL4764 | Pse pDonor | 49 |
| pSL4765 | Pse pDonor | 50 |
| pSL4766 | Pse pDonor | 51 |
| pSL4767 | Pse pDonor | 52 |
| pSL4768 | Pse pDonor | 53 |
| pSL4774 | Pse pDonor | 54 |
| pSL4775 | Pse pDonor | 55 |
| pSL4776 | Pse pDonor | 56 |
| pSL4777 | Pse pDonor | 57 |
| pSL4165 | EcoClpX | 58 |
| pSL4166 | pcDNA3.1_ClpX_BP-NLS | 59 |
| pSL4393 | EcoClpX | 60 |
| pSL4394 | PseClpX | 61 |
| pSL4395 | VchClpX | 62 |
| pSL4396 | hClpX | 63 |
| pSL3410 | Target plasmid | 64 |
| pSL1236 | pDonor | 65 |
| pSL0828 | pQCascade, WT | 66 |
| pSL1014 | pQCascade, NT | 67 |
| pSL1478 | pQCascade, NLS-Cas8 | 68 |
| pSL1479 | pQCascade, Cas8-T2A | 69 |
| pSL1051 | pQCascade, NLS-Cas7 | 70 |
| pSL1480 | pQCascade, Cas7-T2A | 71 |
| pSL2282 | pQCascade, NLS-Cas6 | 72 |
| pSL1053 | pQCascade, Cas6-T2A | 73 |
| pSL1419 | pQCascade, NLS-TniQ | 74 |
| pSL1477 | pQCascade, TniQ-T2A | 75 |
| pSL0283 | pTnsABC | 76 |
| pSL1054 | pTnsABC, NLS-TnsA | 77 |
| pSL1055 | pTnsABC, TnsA-T2A, NLS-TnsB | 78 |
| pSL1482 | pTnsABC, TnsB-T2A | 79 |
| pSL1483 | pTnsABC, NLS-TnsC | 80 |
| pSL1484 | pTnsABC, TnsC-T2A | 81 |
| pSL1738 | pTnsABC, TnsABf | 82 |
| pSL2096 | pTnsABC, NLS-TnsABf | 83 |
| pSL2542 | pTnsABC, TnsABf_internal-NLS | 84 |
| pSL2097 | pTnsABC, TnsABf-NLS | 85 |
| pSL1021 | pEffector, No tags, NT | 86 |
| pSL1022 | pEffector, No tags, WT | 87 |
| pSL1567 | pEffector, all permissive tags | 88 |
| pSL1969 | pEffector, RPV-Cas8 | 89 |
| pSL1970 | pEffector, VP64-Cas7 | 90 |
| pSL1971 | pEffector, VPR-Cas7 | 91 |
| pSL5069 | pDonor(AAVS1), CRISPR_Pse | 92 |
| pSL5008 | pcDNA3.1_Tn7016_TnsA_BP-NLS_TnsB_Δ4 | 93 |
| pSL5009 | pcDNA3.1_Tn7016_TnsA_BP-NLS_TnsB_Δ8 | 94 |
| pSL5010 | pcDNA3.1_Tn7016_TnsA_BP-NLS_TnsB_Δ11 | 95 |
| pSL5011 | pcDNA3.1_Tn7016_TnsA_BP-NLS_TnsB_Δ15 | 96 |
| pSL5012 | pcDNA3.1_Tn7016_TnsA_BP-NLS_TnsB_Δ19 | 97 |
| pSL5013 | pcDNA3.1_Tn7016_TnsA_BP-NLS_TnsB_Δ23 | 98 |
| pSL5014 | pcDNA3.1_Tn7016_TnsA_BP-NLS_TnsB_Δ27 | 99 |
| pSL5015 | pcDNA3.1_BP-NLS_ClpA | 100 |
| pSL5016 | pcDNA3.1_BP-NLS_ClpB | 101 |
| pSL5017 | pcDNA3.1_BP-NLS_ClpP | 102 |

TABLE 2
Sequence and description of proteins

| Protein | | SEQ |
|---|---|---|
| Description | Protein sequence | ID NO |
| E. coli derived | MGMTDKRKDGSGKLLYCSFCGKSQHEVRKLIAGPSVYICDECVD | 1 |
| ClpX | LCNDIIREEIKEVAPHRERSALPTPHEIRNHLDDYVIGQEQAKKVL | |
| | AVAVYNHYKRLRNGDTSNGVELGKSNILLIGPTGSGKTLLAETLA | |
| | RLLDVPFTMADATTLTEAGYVGEDVENIIQKLLQKCDYDVQKAQ | |
| | RGIVYIDEIDKISRKSDNPSITRDVSGEGVQQALLKLIEGTVAAVPP | |
| | QGGRKHPQQEFLQVDTSKILFICGGAFAGLDKVISHRVETGSGIGF | |
| | GATVKAKSDKASEGELLAQVEPEDLIKFGLIPEFIGRLPVVATLNE | |
| | LSEEALIQILKEPKNALTKQYQALFNLEGVDLEFRDEALDAIAKKA | |
| | MARKTGARGLRSIVEAALLDTMYDLPSMEDVEKVVIDESVIDGQS | |
| | KPLLIYGKPEAQQASGE | |
| N-terminus BP- | MGKRTADGSEFESPKKKRKVGSGMTDKRKDGSGKLLYCSFCGKS | 2 |
| NLS tagged E. coli | QHEVRKLIAGPSVYICDECVDLCNDIIREEIKEVAPHRERSALPTPH | |
| derived ClpX | EIRNHLDDYVIGQEQAKKVLAVAVYNHYKRLRNGDTSNGVELGK | |
| | SNILLIGPTGSGKTLLAETLARLLDVPFTMADATTLTEAGYVGEDV | |
| | ENIIQKLLQKCDYDVQKAQRGIVYIDEIDKISRKSDNPSITRDVSGE | |
| | GVQQALLKLIEGTVAAVPPQGGRKHPQQEFLQVDTSKILFICGGAF | |
| | AGLDKVISHRVETGSGIGFGATVKAKSDKASEGELLAQVEPEDLIK | |
| | FGLIPEFIGRLPVVATLNELSEEALIQILKEPKNALTKQYQALFNLE | |
| | GVDLEFRDEALDAIAKKAMARKTGARGLRSIVEAALLDTMYDLP | |
| | SMEDVEKVVIDESVIDGQSKPLLIYGKPEAQQASGE | |
| C-terminus BP- | MGMTDKRKDGSGKLLYCSFCGKSQHEVRKLIAGPSVYICDECVD | 3 |
| NLS tagged E. coli | LCNDIIREEIKEVAPHRERSALPTPHEIRNHLDDYVIGQEQAKKVL | |
| derived ClpX | AVAVYNHYKRLRNGDTSNGVELGKSNILLIGPTGSGKTLLAETLA | |
| | RLLDVPFTMADATTLTEAGYVGEDVENIIQKLLQKCDYDVQKAQ | |
| | RGIVYIDEIDKISRKSDNPSITRDVSGEGVQQALLKLIEGTVAAVPP | |
| | QGGRKHPQQEFLQVDTSKILFICGGAFAGLDKVISHRVETGSGIGF | |
| | GATVKAKSDKASEGELLAQVEPEDLIKFGLIPEFIGRLPVVATLNE | |
| | LSEEALIQILKEPKNALTKQYQALFNLEGVDLEFRDEALDAIAKKA | |
| | MARKTGARGLRSIVEAALLDTMYDLPSMEDVEKVVIDESVIDGQS | |
| | KPLLIYGKPEAQQASGEGSGKRTADGSEFESPKKKRKV | |
| N-terminus BP- | MGKRTADGSEFESPKKKRKVGSGMTDKRKDGSGKLLYCSFCGKS | 4 |
| NLS tagged human | QHEVRKLIAGPSVYICDECVDLCNDIIREEIKEVAPHRERSALPTPH | |
| codon optimized E. | EIRNHLDDYVIGQEQAKKVLAVAVYNHYKRLRNGDTSNGVELGK | |
| coli derived ClpX | SNILLIGPTGSGKTLLAETLARLLDVPFTMADATTLTEAGYVGEDV | |
| | ENIIQKLLQKCDYDVQKAQRGIVYIDEIDKISRKSDNPSITRDVSGE | |
| | GVQQALLKLIEGTVAAVPPQGGRKHPQQEFLQVDTSKILFICGGAF | |
| | AGLDKVISHRVETGSGIGFGATVKAKSDKASEGELLAQVEPEDLIK | |
| | FGLIPEFIGRLPVVATLNELSEEALIQILKEPKNALTKQYQALFNLE | |
| | GVDLEFRDEALDAIAKKAMARKTGARGLRSIVEAALLDTMYDLP | |
| | SMEDVEKVVIDESVIDGQSKPLLIYGKPEAQQASGE | |
| Pseudoalteromonas | MGMSDTPTDGDKSNKLLYCSFCGKSQHEVRKLIAGPSVYICDECV | 5 |
| sp. derived ClpX | ELCNDIIREEIKDIAPKHNSSDKLPVPKEIRNHLDDYVIGQDHAKK | |
| | VLSVAVYNHYKRLRNQSTKQEVELGKSNILLIGPTGSGKTLLAET | |
| | LARLLDVPFTMADATTLTEAGYVGEDVENIIQKLLQKCDYDVEK | |
| | AQRGIVYIDEIDKISRKSDNPSITRDVSGEGVQQALLKLIEGTVASV | |
| | PPQGGRKHPQQEFLQVDTSKILFICGGAFAGLDKVIEQRSHKNTGI | |
| | GFGVNVKESASSRSLSETFKDVEPEDLVKYGLIPEFIGRLPVVATLT | |
| | ELDEAALVQILSEPKNAITKQFSVLFGMEDVELEFRDDALSAIAHK | |
| | AMERKTGARGLRSIVEGVLLDTMYELPSMDDVSKVVIDETVIKGE | |
| | SDPILIYENNNQDKAASE | |
| N-terminus BP- | MGKRTADGSEFESPKKKRKVGSGMSDTPTDGDKSNKLLYCSFCG | 6 |
| NLS tagged human | KSQHEVRKLIAGPSVYICDECVELCNDIIREEIKDIAPKHNSSDKLP | |
| codon optimized | VPKEIRNHLDDYVIGQDHAKKVLSVAVYNHYKRLRNQSTKQEVE | |
| Pseudoalteromonas | LGKSNILLIGPTGSGKTLLAETLARLLDVPFTMADATTLTEAGYVG | |
| sp. derived ClpX | EDVENIIQKLLQKCDYDVEKAQRGIVYIDEIDKISRKSDNPSITRDV | |
| | SGEGVQQALLKLIEGTVASVPPQGGRKHPQQEFLQVDTSKILFICG | |
| | GAFAGLDKVIEQRSHKNTGIGFGVNVKESASSRSLSETFKDVEPED | |
| | LVKYGLIPEFIGRLPVVATLTELDEAALVQILSEPKNAITKQFSVLF | |
| | GMEDVELEFRDDALSAIAHKAMERKTGARGLRSIVEGVLLDTMY | |
| | ELPSMDDVSKVVIDETVIKGESDPILIYENNNQDKAASE | |
| Vibrio cholerae | MGMTDKSKEGGSSKLLYCSFCGKSQHEVRKLIAGPSVYICDECVD | 7 |
| derived ClpX | LCNDIIREEIKDVLPKKESAALPTPRKIREHLDDYVIGQEHAKKVL | |
| | AVAVYNHYKRLRNGDTTSEGVELGKSNILLIGPTGSGKTLLAETL | |
| | ARLLDVPFTMADATTLTEAGYVGEDVENIIQKLLQKCDYDVAKA | |
| | ERGIVYIDEIDKISRKSENPSITRDVSGEGVQQALLKLIEGTVASVPP | |
| | QGGRKHPQQEFLQVDTSKILFICGGAFAGLDKVIEQRVATGTGIGF | |
| | GADVRSKDNSKTLSELFTQVEPEDLVKYGLIPEFIGRLPVTATLTE | |
| | LDEEALIQILCEPKNALTKQYAALFELENVDLEFREDALKAIAAKA | |
| | MKRKTGARGLRSILEAVLLETMYELPSMEEVSKVVIDESVINGES | |
| | APLLIYSANESQAAGAE | |
| N-terminus BP- | MGKRTADGSEFESPKKKRKVGSGMTDKSKEGGSSKLLYCSFCGK | 8 |
| NLS tagged human | SQHEVRKLIAGPSVYICDECVDLCNDIIREEIKDVLPKKESAALPTP | |
| codon optimized | RKIREHLDDYVIGQEHAKKVLAVAVYNHYKRLRNGDTTSEGVEL | |
| Vibrio cholerae | GKSNILLIGPTGSGKTLLAETLARLLDVPFTMADATTLTEAGYVGE | |
| derived ClpX | DVENIIQKLLQKCDYDVAKAERGIVYIDEIDKISRKSENPSITRDVS | |
| | GEGVQQALLKLIEGTVASVPPQGGRKHPQQEFLQVDTSKILFICGG | |
| | AFAGLDKVIEQRVATGTGIGFGADVRSKDNSKTLSELFTQVEPED | |
| | LVKYGLIPEFIGRLPVTATLTELDEEALIQILCEPKNALTKQYAALF | |
| | ELENVDLEFREDALKAIAAKAMKRKTGARGLRSILEAVLLETMYE | |
| | LPSMEEVSKVVIDESVINGESAPLLIYSANESQAAGAE | |
| N-terminus BP- | MGKRTADGSEFESPKKKRKVGSGMLNQELELSLNMAFARAREHR | 9 |
| NLS tagged E. coli | HEFMTVEHLLLALLSNPSAREALEACSVDLVALRQELEAFIEQTTP | |
| derived ClpA | VLPASEEERDTQPTLSFQRVLQRAVFHVQSSGRNEVTGANVLVAI | |
| | FSEQESQAAYLLRKHEVSRLDVVNFISHGTRKDEPTQSSDPGSQPN | |
| | SEEQAGGEERMENFTTNLNQLARVGGIDPLIGREKELERAIQVLCR | |
| | RRKNNPLLVGESGVGKTAIAEGLAWRIVQGDVPEVMADCTIYSL | |
| | DIGSLLAGTKYRGDFEKRFKALLKQLEQDTNSILFIDEIHTIIGAGA | |
| | ASGGQVDAANLIKPLLSSGKIRVIGSTTYQEFSNIFEKDRALARRFQ | |
| | KIDITEPSIEETVQIINGLKPKYEAHHDVRYTAKAVRAAVELAVKY | |
| | INDRHLPDKAIDVIDEAGARARLMPVSKRKKTVNVADIESVVARI | |
| | ARIPEKSVSQSDRDTLKNLGDRLKMLVFGQDKAIEALTEAIKMAR | |
| | AGLGHEHKPVGSFLFAGPTGVGKTEVTVQLSKALGIELLRFDMSE | |
| | YMERHTVSRLIGAPPGYVGFDQGGLLTDAVIKHPHAVLLLDEIEK | |
| | AHPDVFNILLQVMDNGTLTDNNGRKADFRNVVLVMTTNAGVRE | |
| | TERKSIGLIHQDNSTDAMEEIKKIFTPEFRNRLDNIIWFDHLSTDVIH | |
| | QVVDKFIVELQVQLDQKGVSLEVSQEARNWLAEKGYDRAMGAR | |
| | PMARVIQDNLKKTLANELLFGSLVDGGQVTVALDKEKNELTYGF | |
| | QSAQKHKAEAAH | |
| N-terminus BP- | MGKRTADGSEFESPKKKRKVGSGMRLDRLTNKFQLALADAQSLA | 10 |
| NLS tagged E. coli | LGHDNQFIEPLHLMSALLNQEGGSVSPLLTSAGINAGQLRTDINQA | |
| derived ClpB | LNRLPQVEGTGGDVQPSQDLVRVLNLCDKLAQKRGDNFISSELFV | |
| | LAALESRGTLADILKAAGATTANITQAIEQMRGGESVNDQGAEDQ | |
| | RQALKKYTIDLTERAEQGKLDPVIGRDEEIRRTIQVLQRRTKNNPV | |
| | LIGEPGVGKTAIVEGLAQRIINGEVPEGLKGRRVLALDMGALVAG | |
| | AKYRGEFEERLKGVLNDLAKQEGNVILFIDELHTMVGAGKADGA | |
| | MDAGNMLKPALARGELHCVGATTLDEYRQYIEKDAALERRFQK | |
| | VFVAEPSVEDTIAILRGLKERYELHHHVQITDPAIVAAATLSHRYIA | |
| | DRQLPDKAIDLIDEAASSIRMQIDSKPEELDRLDRRIIQLKLEQQAL | |
| | MKESDEASKKRLDMLNEELSDKERQYSELEEEWKAEKASLSGTQ | |
| | TIKAELEQAKIAIEQARRVGDLARMSELQYGKIPELEKQLEAATQL | |
| | EGKTMRLLRNKVTDAEIAEVLARWTGIPVSRMMESEREKLLRME | |
| | QELHHRVIGQNEAVDAVSNAIRRSRAGLADPNRPIGSFLFLGPTGV | |
| | GKTELCKALANFMFDSDEAMVRIDMSEFMEKHSVSRLVGAPPGY | |
| | VGYEEGGYLTEAVRRRPYSVILLDEVEKAHPDVFNILLQVLDDGR | |
| | LTDGQGRTVDFRNTVVIMTSNLGSDLIQERFGELDYAHMKELVLG | |
| | VVSHNFRPEFINRIDEVVVFHPLGEQHIASIAQIQLKRLYKRLEERG | |
| | YEIHISDEALKLLSENGYDPVYGARPLKRAIQQQIENPLAQQILSGE | |
| | LVPGKVIRLEVNEDRIVAVQ | |
| N-terminus BP- | MGKRTADGSEFESPKKKRKVGSGMSYSGERDNFAPHMALVPMVI | 11 |
| NLS tagged E. coli | EQTSRGERSFDIYSRLLKERVIFLTGQVEDHMANLIVAQMLFLEAE | |
| derived ClpP | NPEKDIYLYINSPGGVITAGMSIYDTMQFIKPDVSTICMGQAASMG | |
| | AFLLTAGAKGKRFCLPNSRVMIHQPLGGYQGQATDIEIHAREILKV | |
| | KGRMNELMALHTGQSLEQIERDTERDRFLSAPEAVEYGLVDSILT | |
| | HRN | |

TABLE 3
Guide RNA sequences

| Guide | Target | | | SEQ |
|---|---|---|---|---|
| RNA ID | ID | Description | Target Sequence | ID NO |
| crRNA 1 | tSL0264 | | AATGCAGGCAAATCAACCTTAGTCTGAAGGCC | 103 |
| crRNA 2 | tSL0263 | | TTAAGAAGTAAGTTGTGTTCTTCTTTGCCTAG | 104 |
| crRNA 3 | tSL0365 | | TCAGGAGACTGTGTAACACCAATGCAGGCAAA | 105 |
| crRNA 4 | tSL0265 | | TAGGCAAAGAAGAACACAACTTACTTCTTAAG | 106 |
| crRNA 5 | tSL0366 | | TTGCGACGTAGGGATAACAGGGTAATCCTCAG | 107 |
| crRNA 6 | tSL0367 | | CTTGCGACGTAGGGATAACAGGGTAATCCTCA | 108 |
| crRNA 7 | tSL0368 | | AGTGTGATGGATATCTGCAGAATTCGCCCTTG | 109 |
| sgRNA 8 | tSL0435 | TTN sgRNA 4 | ATGAGCTCTCTTCAACGTTA | 110 |
| sgRNA 9 | tSL0434 | TTN sgRNA 3 | GGGCACAGTCCTCAGGTTTG | 111 |
| sgRNA 10 | tSL0433 | TTN sgRNA 2 | ATGTTAAAATCCGAAAATGC | 112 |
| sgRNA 11 | tSL0447 | TTN sgRNA 1 | CCTTGGTGAAGTCTCCTTTG | 113 |
| crRNA 12 | tSL0378 | TTN crRNA 4 | AAGGAAATAGAACTGTATTTAAAGAATAACTG | 114 |
| crRNA 13 | tSL0377 | TTN crRNA 3 | TCAAAGGAGACTTCACCAAGGAAATAGAACTG | 115 |
| crRNA 14 | tSL0375 | TTN crRNA 1; | TTGGTGAAGTCTCCTTTGAGGTACTAAATTTA | 116 |
| | | ChIP T crRNA | | |
| crRNA 15 | tSL0376 | TTN crRNA 2 | TTTGAGGTACTAAATTTAGCACTGTCAATCAG | 117 |
| crRNA 16 | tSL0416 | MIAT crRNA 4 | AAGGGCTTAACCAGGAAGACCTCGGGTGTATG | 118 |
| crRNA 17 | tSL0415 | MIAT crRNA 3 | GTCCACATTAGGCCGCAGAGAGCTCAGGGCTG | 119 |
| crRNA 18 | tSL0414 | MIAT crRNA 2 | GTCCACATTAGGCCGCAGAGAGCTCAGGGCTG | 120 |
| crRNA 19 | tSL0413 | MIAT crRNA 1 | GCTCCCGCATTAAAATTTCATGGGCGCTGCAG | 121 |
| crRNA 20 | tSL0420 | ASCL1 crRNA 4 | GAGGAGTGGTTGTGAGCCGTCCTGTAGGTGGG | 122 |
| crRNA 21 | tSL0419 | ASCL1 crRNA 3 | TCGGTGACCCTAGAAATTGGAGCAAATTACGA | 123 |
| crRNA 22 | tSL0418 | ASCL1 crRNA 2 | CTGCGCTTTGCTTCAAGTTCTTAGTAGAATCC | 124 |
| crRNA 23 | tSL0417 | ASCL1 crRNA 1 | CCTCCCGTTCCTTTCTCCCGCTCCTTGCAAAC | 125 |
| crRNA 24 | tSL0423 | ACTC1 crRNA 3 | TGAATGGCTTTACTCAGAGAGCTGGTGCTGGG | 126 |
| crRNA 25 | tSL0422 | ACTC1 crRNA 2 | ACTCAGATGTGCTGCTGCGGTGTCCTTTGTGC | 127 |
| crRNA 26 | tSL0421 | ACTC1 crRNA 1 | TCAGCAGAGGGCAGGGCGCCAAGCCTTCCCAC | 128 |
| sgRNA 27 | tSL0436 | MIAT sgRNA 1 | GCGCCCATGAAATTTTAATG | 129 |
| sgRNA 28 | tSL0437 | MIAT sgRNA 2 | ATGCGGGAGGCTGAGCGCAC | 130 |
| sgRNA 29 | tSL0438 | MIAT sgRNA 3 | CATTAGGCCGCAGAGAGCTC | 131 |
| sgRNA 30 | tSL0439 | MIAT sgRNA 4 | GCTTCTGCGCCCCTGGTCCG | 132 |
| sgRNA 31 | tSL0440 | ASCL1 sgRNA 1 | CGGGAGAAAGGAACGGGAGG | 133 |
| sgRNA 32 | tSL0441 | ASCL1 sgRNA 2 | AAGAACTTGAAGCAAAGCGC | 134 |
| sgRNA 33 | tSL0442 | ASCL1 sgRNA 3 | TCCAATTTCTAGGGTCACCG | 135 |
| sgRNA 34 | tSL0443 | ASCL1 sgRNA 4 | GTTGTGAGCCGTCCTGTAGG | 136 |
| sgRNA 35 | tSL0444 | ACTC1 sgRNA 1 | TGGCGCCCTGCCCTCTGCTG | 137 |
| sgRNA 36 | tSL0445 | ACTC1 sgRNA 2 | ACCGCAGCAGCACATCTGAG | 138 |
| sgRNA 37 | tSL0446 | ACTC1 sgRNA 3 | AATGGCTTTACTCAGAGAGC | 139 |
| crRNA 38 | tSL0105 | NT crRNA for | GCGAGGTATTCGGCTCCGCGACGGAGGCTAAG | 140 |
| | | activation, | | |
| | | ChIP, and | | |
| | | integration | | |
| | | assays | | |
| crRNA 39 | tSL0396 | | AGGGGTCCGAGAGCTCAGCTAGTCTTCTTCCT | 141 |
| crRNA 40 | tSL0394 | | GAGCTGGGACCACCTTATATTCCCAGGGCCGG | 142 |
| crRNA 41 | tSL0424 | | CAGGGCCGGTTAATGTGGCTCTGGTTCTGGGT | 143 |
| crRNA 42 | tSL0426 | | CCTCCACCCCACAGTGGGGCCACTAGGGACAG | 144 |
| crRNA 43 | tSL0425 | | ACAGTGGGGCCACTAGGGACAGGATTGGTGAC | 145 |
| crRNA 44 | tSL0427 | | TTAGGCCTCCTCCTTCCTAGTCTCCTGATATT | 146 |
| crRNA 45 | tSL0392 | | TGTTAGGCAGATTCCTTATCTGGTGACACACC | 147 |
| AAVS1-1 | tSL0425 | | ACAGTGGGGCCACTAGGGACAGGATTGGTGAC | 148 |
| AAVS1-2 | tSL0394 | | GAGCTGGGACCACCTTATATTCCCAGGGCCGG | 149 |
| AAVS1-3 | tSL0533 | | CCAGGGTGTGCTGGGCAGGTCGCGGGGAGCGC | 150 |
| HEK3-1 | tSL0428 | | CTGCTTCCTCCAGAGGGCGTCGCAGGACAGCT | 151 |
| ACTB-1 | tSL0455 | | CGGAGCTGCGCCCTTTCTCACTGGTTCTCTCT | 152 |
| ACTB-2 | tSL0456 | | GTAGGACTCTCTTCTCTGACCTGAGTCTCCTT | 153 |
| ACTB-3 | tSL0457 | | ATGAGGCTGGTGTAAAGCGGCCTTGGAGTGTG | 154 |
| CANX-1 | tSL0458 | | TCTCCTCACTGTGCCCTGAAAAGTATTTCTTA | 155 |
| CANX-2 | tSL0459 | | TTTAGGGAGCTTAAATTCTACTTGGGGGAAAC | 156 |
| CANX-3 | tSL0460 | | ATTGCTTACTAAAGTCCTTTACCCAGCACCTC | 157 |
| CBX1-1 | tSL0461 | | CACAATTCAAACTACTGTCAAAGTAGTTTTGT | 158 |
| CBX1-2 | tSL0462 | | TGAAATCTTAGGTAGGCTAATGCCTACAAAGT | 159 |
| CBX1-3 | tSL0463 | | AAAGGATTCTAACAGCTCTCTTACTTGAGCCA | 160 |
| VIM-1 | tSL0464 | | TGTGCTCCAGAATTAGTGATTTGCTTTGGTGC | 161 |
| QARS1-1 | tSL0474 | | TGGCAAGCAAGATGACCACTTGCTGTTCCCAT | 162 |
| OXA1L-1 | tSL0475 | | TGACCCAGTGAACCAGGCCCCAGGACAGCTCG | 163 |
| OXA1L-2 | tSL0476 | | TGCTCACCGGGACCTGAATGTCATGACCTCGG | 164 |
| OXA1L-3 | tSL0477 | | TGGCGAGAGCACCTCGGCCTCGTTCTCAGGGC | 165 |
| NT | tSL0000 | | GTTGTCTGACACTTGTCACAAACCGCTAGGAG | 166 |
| T | tSL0004 | | AGTACAGCGCGGCTGAAATCATCATTAAAGCG | 167 |

[0235] The scope of the present invention is not limited by what has been specifically shown and described hereinabove. Those skilled in the art will recognize that there are suitable alternatives to the depicted examples of materials, configurations, constructions, and dimensions. Variations, modifications, and other implementations of what is described herein will occur to those of ordinary skill in the art without departing from the spirit and scope of the invention.

[0236] Numerous references, including patents and various publications, are cited and discussed in the description of this invention. The citation and discussion of such references is provided merely to clarify the description of the present invention and is not an admission that any reference is prior art to the invention described herein. All references cited and discussed in this specification are incorporated herein by reference in their entirety.

The application's sequence listing, which the Patent Office published only in electronic form, follows.

SEQUENCE LISTING (208 sequences)

SEQ ID NO: 1 - protein, 426 aa, Escherichia coli
MGMTDKRKDGSGKLLYCSFCGKSQHEVRKLIAGPSVYICDECVDLCNDIIREEIKEVAPHRERSALPTPHEIRNHLDDYVIGQEQAKKVLAVAVYNHYKRLRNGDTSNGVELGKSNILLIGPTGSGKTLLAETLARLLDVPFTMADATTLTEAGYVGEDVENIIQKLLQKCDYDVQKAQRGIVYIDEIDKISRKSDNPSITRDVSGEGVQQALLKLIEGTVAAVPPQGGRKHPQQEFLQVDTSKILFICGGAFAGLDKVISHRVETGSGIGFGATVKAKSDKASEGELLAQVEPEDLIKFGLIPEFIGRLPVVATLNELSEEALIQILKEPKNALTKQYQALFNLEGVDLEFRDEALDAIAKKAMARKTGARGLRSIVEAALLDTMYDLPSMEDVEKVVIDESVIDGQSKPLLIYGKPEAQQASGE

SEQ ID NO: 2 - protein, 447 aa, synthetic construct
MGKRTADGSEFESPKKKRKVGSGMTDKRKDGSGKLLYCSFCGKSQHEVRKLIAGPSVYICDECVDLCNDIIREEIKEVAPHRERSALPTPHEIRNHLDDYVIGQEQAKKVLAVAVYNHYKRLRNGDTSNGVELGKSNILLIGPTGSGKTLLAETLARLLDVPFTMADATTLTEAGYVGEDVENIIQKLLQKCDYDVQKAQRGIVYIDEIDKISRKSDNPSITRDVSGEGVQQALLKLIEGTVAAVPPQGGRKHPQQEFLQVDTSKILFICGGAFAGLDKVISHRVETGSGIGFGATVKAKSDKASEGELLAQVEPEDLIKFGLIPEFIGRLPVVATLNELSEEALIQILKEPKNALTKQYQALFNLEGVDLEFRDEALDAIAKKAMARKTGARGLRSIVEAALLDTMYDLPSMEDVEKVVIDESVIDGQSKPLLIYGKPEAQQASGE

SEQ ID NO: 3 - protein, 447 aa, synthetic construct
MGMTDKRKDGSGKLLYCSFCGKSQHEVRKLIAGPSVYICDECVDLCNDIIREEIKEVAPHRERSALPTPHEIRNHLDDYVIGQEQAKKVLAVAVYNHYKRLRNGDTSNGVELGKSNILLIGPTGSGKTLLAETLARLLDVPFTMADATTLTEAGYVGEDVENIIQKLLQKCDYDVQKAQRGIVYIDEIDKISRKSDNPSITRDVSGEGVQQALLKLIEGTVAAVPPQGGRKHPQQEFLQVDTSKILFICGGAFAGLDKVISHRVETGSGIGFGATVKAKSDKASEGELLAQVEPEDLIKFGLIPEFIGRLPVVATLNELSEEALIQILKEPKNALTKQYQALFNLEGVDLEFRDEALDAIAKKAMARKTGARGLRSIVEAALLDTMYDLPSMEDVEKVVIDESVIDGQSKPLLIYGKPEAQQASGEGSGKRTADGSEFESPKKKRKV

SEQ ID NO: 4 - protein, 447 aa, synthetic construct; identical to SEQ ID NO: 2

SEQ ID NO: 5 - protein, 429 aa, Pseudoalteromonas sp.
MGMSDTPTDGDKSNKLLYCSFCGKSQHEVRKLIAGPSVYICDECVELCNDIIREEIKDIAPKHNSSDKLPVPKEIRNHLDDYVIGQDHAKKVLSVAVYNHYKRLRNQSTKQEVELGKSNILLIGPTGSGKTLLAETLARLLDVPFTMADATTLTEAGYVGEDVENIIQKLLQKCDYDVEKAQRGIVYIDEIDKISRKSDNPSITRDVSGEGVQQALLKLIEGTVASVPPQGGRKHPQQEFLQVDTSKILFICGGAFAGLDKVIEQRSHKNTGIGFGVNVKESASSRSLSETFKDVEPEDLVKYGLIPEFIGRLPVVATLTELDEAALVQILSEPKNAITKQFSVLFGMEDVELEFRDDALSAIAHKAMERKTGARGLRSIVEGVLLDTMYELPSMDDVSKVVIDETVIKGESDPILIYENNNQDKAASE

SEQ ID NO: 6 - protein, 450 aa, synthetic construct
MGKRTADGSEFESPKKKRKVGSGMSDTPTDGDKSNKLLYCSFCGKSQHEVRKLIAGPSVYICDECVELCNDIIREEIKDIAPKHNSSDKLPVPKEIRNHLDDYVIGQDHAKKVLSVAVYNHYKRLRNQSTKQEVELGKSNILLIGPTGSGKTLLAETLARLLDVPFTMADATTLTEAGYVGEDVENIIQKLLQKCDYDVEKAQRGIVYIDEIDKISRKSDNPSITRDVSGEGVQQALLKLIEGTVASVPPQGGRKHPQQEFLQVDTSKILFICGGAFAGLDKVIEQRSHKNTGIGFGVNVKESASSRSLSETFKDVEPEDLVKYGLIPEFIGRLPVVATLTELDEAALVQILSEPKNAITKQFSVLFGMEDVELEFRDDALSAIAHKAMERKTGARGLRSIVEGVLLDTMYELPSMDDVSKVVIDETVIKGESDPILIYENNNQDKAASE

SEQ ID NO: 7 - protein, 428 aa, Vibrio cholerae
MGMTDKSKEGGSSKLLYCSFCGKSQHEVRKLIAGPSVYICDECVDLCNDIIREEIKDVLPKKESAALPTPRKIREHLDDYVIGQEHAKKVLAVAVYNHYKRLRNGDTTSEGVELGKSNILLIGPTGSGKTLLAETLARLLDVPFTMADATTLTEAGYVGEDVENIIQKLLQKCDYDVAKAERGIVYIDEIDKISRKSENPSITRDVSGEGVQQALLKLIEGTVASVPPQGGRKHPQQEFLQVDTSKILFICGGAFAGLDKVIEQRVATGTGIGFGADVRSKDNSKTLSELFTQVEPEDLVKYGLIPEFIGRLPVTATLTELDEEALIQILCEPKNALTKQYAALFELENVDLEFREDALKAIAAKAMKRKTGARGLRSILEAVLLETMYELPSMEEVSKVVIDESVINGESAPLLIYSANESQAAGAE

SEQ ID NO: 8 - protein, 449 aa, synthetic construct
MGKRTADGSEFESPKKKRKVGSGMTDKSKEGGSSKLLYCSFCGKSQHEVRKLIAGPSVYICDECVDLCNDIIREEIKDVLPKKESAALPTPRKIREHLDDYVIGQEHAKKVLAVAVYNHYKRLRNGDTTSEGVELGKSNILLIGPTGSGKTLLAETLARLLDVPFTMADATTLTEAGYVGEDVENIIQKLLQKCDYDVAKAERGIVYIDEIDKISRKSENPSITRDVSGEGVQQALLKLIEGTVASVPPQGGRKHPQQEFLQVDTSKILFICGGAFAGLDKVIEQRVATGTGIGFGADVRSKDNSKTLSELFTQVEPEDLVKYGLIPEFIGRLPVTATLTELDEEALIQILCEPKNALTKQYAALFELENVDLEFREDALKAIAAKAMKRKTGARGLRSILEAVLLETMYELPSMEEVSKVVIDESVINGESAPLLIYSANESQAAGAE

SEQ ID NO: 9 - protein, 781 aa, synthetic construct
MGKRTADGSEFESPKKKRKVGSGMLNQELELSLNMAFARAREHRHEFMTVEHLLLALLSNPSAREALEACSVDLVALRQELEAFIEQTTPVLPASEEERDTQPTLSFQRVLQRAVFHVQSSGRNEVTGANVLVAIFSEQESQAAYLLRKHEVSRLDVVNFISHGTRKDEPTQSSDPGSQPNSEEQAGGEERMENFTTNLNQLARVGGIDPLIGREKELERAIQVLCRRRKNNPLLVGESGVGKTAIAEGLAWRIVQGDVPEVMADCTIYSLDIGSLLAGTKYRGDFEKRFKALLKQLEQDTNSILFIDEIHTIIGAGAASGGQVDAANLIKPLLSSGKIRVIGSTTYQEFSNIFEKDRALARRFQKIDITEPSIEETVQIINGLKPKYEAHHDVRYTAKAVRAAVELAVKYINDRHLPDKAIDVIDEAGARARLMPVSKRKKTVNVADIESVVARIARIPEKSVSQSDRDTLKNLGDRLKMLVFGQDKAIEALTEAIKMARAGLGHEHKPVGSFLFAGPTGVGKTEVTVQLSKALGIELLRFDMSEYMERHTVSRLIGAPPGYVGFDQGGLLTDAVIKHPHAVLLLDEIEKAHPDVFNILLQVMDNGTLTDNNGRKADFRNVVLVMTTNAGVRETERKSIGLIHQDNSTDAMEEIKKIFTPEFRNRLDNIIWFDHLSTDVIHQVVDKFIVELQVQLDQKGVSLEVSQEARNWLAEKGYDRAMGARPMARVIQDNLKKTLANELLFGSLVDGGQVTVALDKEKNELTYGFQSAQKHKAEAAH

SEQ ID NO: 10 - protein, 880 aa, synthetic construct
MGKRTADGSEFESPKKKRKVGSGMRLDRLTNKFQLALADAQSLALGHDNQFIEPLHLMSALLNQEGGSVSPLLTSAGINAGQLRTDINQALNRLPQVEGTGGDVQPSQDLVRVLNLCDKLAQKRGDNFISSELFVLAALESRGTLADILKAAGATTANITQAIEQMRGGESVNDQGAEDQRQALKKYTIDLTERAEQGKLDPVIGRDEEIRRTIQVLQRRTKNNPVLIGEPGVGKTAIVEGLAQRIINGEVPEGLKGRRVLALDMGALVAGAKYRGEFEERLKGVLNDLAKQEGNVILFIDELHTMVGAGKADGAMDAGNMLKPALARGELHCVGATTLDEYRQYIEKDAALERRFQKVFVAEPSVEDTIAILRGLKERYELHHHVQITDPAIVAAATLSHRYIADRQLPDKAIDLIDEAASSIRMQIDSKPEELDRLDRRIIQLKLEQQALMKESDEASKKRLDMLNEELSDKERQYSELEEEWKAEKASLSGTQTIKAELEQAKIAIEQARRVGDLARMSELQYGKIPELEKQLEAATQLEGKTMRLLRNKVTDAEIAEVLARWTGIPVSRMMESEREKLLRMEQELHHRVIGQNEAVDAVSNAIRRSRAGLADPNRPIGSFLFLGPTGVGKTELCKALANFMFDSDEAMVRIDMSEFMEKHSVSRLVGAPPGYVGYEEGGYLTEAVRRRPYSVILLDEVEKAHPDVFNILLQVLDDGRLTDGQGRTVDFRNTVVIMTSNLGSDLIQERFGELDYAHMKELVLGVVSHNFRPEFINRIDEVVVFHPLGEQHIASIAQIQLKRLYKRLEERGYEIHISDEALKLLSENGYDPVYGARPLKRAIQQQIENPLAQQILSGELVPGKVIRLEVNEDRIVAVQ

SEQ ID NO: 11 - protein, 230 aa, synthetic construct
MGKRTADGSEFESPKKKRKVGSGMSYSGERDNFAPHMALVPMVIEQTSRGERSFDIYSRLLKERVIFLTGQVEDHMANLIVAQMLFLEAENPEKDIYLYINSPGGVITAGMSIYDTMQFIKPDVSTICMGQAASMGAFLLTAGAKGKRFCLPNSRVMIHQPLGGYQGQATDIEIHAREILKVKGRMNELMALHTGQSLEQIERDTERDRFLSAPEAVEYGLVDSILTHRN

SEQ ID NO: 12 - DNA, 4883 bp, synthetic construct
  source 1..4883: mol_type = other DNA
catttatattccccagaacatcaggttaatggcgtttttgatgtcattttcgcggtggctgagatcagccacttcttccccgataacggagaccggcacactggccatatcggtggtcatcatgcgccagctttcatccccgatatgcaccaccgggtaaagttcacgggagactttatctgacagcagacgtgcactggccagggggatcaccatccgtcgccccggcgtgtcaataatatcactctgtacatccacaaacagacgataacggctctctcttttataggtgtaaaccttaaactgccgtacgtataggctgcgcaactgttgggaagggcgatcggtgcgggcctcttcgctattacgccagctggcgaaagggggatgtgctgcaaggcgattaagttgggtaacgccagggttttcccagtcacgacgttgtaaaacgacggccagtgaattgtaatacgactcactatagggcgaattgggccctctagatgcatgctcgagcggccgccagtgtgatggatatctgcagaattcgcccttgcgacgtagggataacagggtaatcctcaggagactgtgtaacaccaatgcaggcaaatcaaccttagtctgaaggcctaggcaaagaagaacacaacttacttcttaaggtcccctccaccccacagtggggcgaggtaggcgtgtacggtgggaggcctatataagcagagctcgtttagtgaaccgtcagatcgcctggagaattcgccaccatggactacaaggatgacgacgataaaacttccggtggcggactgggttccaccgcgagcaagggcgaggaggataacatggccatcatcaaggagttcatgcgcttcaaggtgcacatggagggctccgtgaacggccacgagttcgagatcgagggcgagggcgagggccgcccctacgagggcacccagaccgccaagctgaaggtgaccaagggcggccccctgcccttcgcctgggacatcctgtcccctcagttcatgtacggctccaaggcctacgtgaagcaccccgccgacatccccgactacttgaagctgtccttccccgagggcttcaagtgggagcgcgtgatgaacttcgaggacggcggcgtggtgaccgtgacccaggactcctccctacaggacggcgagttcatctacaaggtgaagctgcgcggcaccaacttcccctccgacggccccgtaatgcagaagaagacgatgggctgggaggcctcctccgagcggatgtaccccgaggacggcgccctgaagggcgagatcaagcagaggctgaagctgaaggacggcggccactacgacgccgaggtcaagaccacctacaaggccaagaagcccgtgcagctgcccggcgcctacaacgtcaacatcaagttggacatcacctcccacaacgaggactacaccatcgtggaacagtacgagcgcgccgagggccgccactccaccggcggcatggacgagctgtacaaggcccgcggttaagatgcatgccagttctaggaattcgagctcggtacccggggatcctctagtcagctgacgcgtgctagcgcggccgcatcgataagcttgtcgacgatatctctagaggatcataatcagccataccacatttgtagaggttttacttgctttaaaaaacctcccacacctccccctgaacctgaaacataaaatgaatgcaattgttgttgttaacttgtttattgcagcttataatggttacaaataaagcaatagcatcacaaatttcacaaataaagcatttttttcactgcctcgagcttcctcgctcactgactcgctgcgctcggtcgttcggctgcggcgagcggtatcagctcactcaaaggcggtaataaagggcgaattccagcacactggcggccgttactagtggatccgagctcggtaccaagcttgatgcatagcttgagtattctatagtgtcacctaaatagcttggcgtaatcatggtcatagctgtttcctgtgtgaaattgttatccgctcacaattccacacaacatacgagccggaagcataaagtgtaaagcctggggtgcctaatgagtgagctaactcacattaattgcgttgcgctcactgcccgctttccagtcgggaaacctgtcgtgccagctgcattaatgaatcggccaacgcgcggggagaggcggtttgcgtattgggcgctcttccgcttcctcgctcactgactcgctgcgctcggtcgttcggctgcggcgagcggtatcagctcactcaaaggcggtaatacggttatccacagaatcaggggataacgcaggaaagaacatgtgagcaaaaggccagcaaaaggccaggaaccgtaaaaaggccgcgttgctggcgtttttccataggctccgcccccctgacgagcatcacaaaaatcgacgctcaagtcagaggtggcgaaacccgacaggactataaagataccaggcgtttccccctggaagctccctcgtgcgctctcctgttccgaccctgccgcttaccggatacctgtccgcctttctcccttcgggaagcgtggcgctttctcatagctcacgctgtaggtatctcagttcggtgtaggtcgttcgctccaagctgggctgtgtgcacgaaccccccgttcagcccgaccgctgcgccttatccggtaactatcgtcttgagtccaacccggtaagacacgacttatcgccactggcagcagccactggtaacaggattagcagagcgaggtatgtaggcggtgctacagagttcttgaagtggtggcctaactacggctacactagaagaacagtatttggtatctgcgctctgctgaagccagttaccttcggaaaaagagttggtagctcttgatccggcaaacaaaccaccgctggtagcggtggtttttttgtttgcaagcagcagattacgcgcagaaaaaaaggatctcaagaagatcctttgatcttttctacggggtctgacgctcagtggaacgaaaactcacgttaagggattttggtcatgagattatcaaaaaggatcttcacctagatccttttaaattaaaaatgaagttttagcacgtgtcagtcctgctcctcggccacgaagtgcacgcagttgccggccgggtcgcgcagggcgaactcccgcccccacggctgctcgccgatctcggtcatggccggcccggaggcgtcccggaagttcgtggacacgacctccgaccactcggcgtacagctcgtccaggccgcgcacccacacccaggccagggtgttgtccggcaccacctggtcctggaccgcgctgatgaacagggtcacgtcgtcccggaccacaccggcgaagtcgtcctccacgaagtcccgggagaacccgagccggtcggtccagaactcgaccgctccggcgacgtcgcgcgcggtgagcaccggaacggcactggtcaacttggccatggtggccctcctcacgtgctattattgaagcatttatcagggttattgtctcatgagcggatacatatttgaatgtatttagaaaaataaacaaataggggttccgcgcacatttccccgaaaagtgccacctgatgcggtgtgaaataccgcacagatgcgtaaggagaaaataccgcatcaggaaattgtaagcgttaataattcagaagaactcgtcaagaaggcgatagaaggcgatgcgctgcgaatcgggagcggcgataccgtaaagcacgaggaagcggtcagcccattcgccgccaagctcttcagcaatatcacgggtagccaacgctatgtcctgatagcggtccgccacacccagccggccacagtcgatgaatccagaaaagcggccattttccaccatgatattcggcaagcaggcatcgccatgggtcacgacgagatcctcgccgtcgggcatgctcgccttgagcctggcgaacagttcggctggcgcgagcccctgatgctcttcgtccagatcatcctgatcgacaagaccggcttccatccgagtacgtgctcgctcgatgcgatgtttcgcttggtggtcgaatgggcaggtagccggatcaagcgtatgcagccgccgcattgcatcagccatgatggatactttctcggcaggagcaaggtgagatgacaggagatcctgccccggcacttcgcccaatagcagccagtcccttcccgcttcagtgacaacgtcgagcacagctgcgcaaggaacgcccgtcgtggccagccacgatagccgcgctgcctcgtcttgcagttcattcagggcaccggacaggtcggtcttgacaaaaagaaccgggcgcccctgcgctgacagccggaacacggcggcatcagagcagccgattgtctgttgtgcccagtcatagccgaatagcctctccacccaagcggccggagaacctgcgtgcaatccatcttgttcaatcatgcgaaacgatcctcatcctgtctcttgatcagagcttgatcccctgcgccatcagatccttggcggcaagaaagccatccagtttactttgcagggcttcccaaccttaccagagggcgccccagctggcaattccggttcgcttgctgtccataaaaccgcccagtctagctatcgccatgtaagcccactgcaagctacctgctttctctttgcgcttgcgttttcccttgtccagatagcccagtagctgacattcatccggggtcagcaccgtttctgcggactggctttctacgtgaaaaggatctaggtgaagatcctttttgataatctcatgcctga

SEQ ID NO: 13 - DNA, 10693 bp, synthetic construct
  source 1..10693: mol_type = other DNA
gacggatcgggagatctcccgatcccctatggtgcactctcagtacaatctgctctgatgccgcatagttaagccagtatctgctccctgcttgtgtgttggaggtcgctgagtagtgcgcgagcaaaatttaagctacaacaaggcaaggcttgaccgacaattgcatgaagaatctgcttagggttaggcgttttgcgctgcttcgcgatgtacgggccagatatacgcgttgacattgattattgactagttattaatagtaatcaattacggggtcattagttcatagcccatatatggagttccgcgttacataacttacggtaaatggcccgcctggctgaccgcccaacgacccccgcccattgacgtcaataatgacgtatgttcccatagtaacgccaatagggactttccattgacgtcaatgggtggagtatttacggtaaactgcccacttggcagtacatcaagtgtatcatatgccaagtacgccccctattgacgtcaatgacggtaaatggcccgcctggcattatgcccagtacatgaccttatgggactttcctacttggcagtacatctacgtattagtcatcgctattaccatggtgatgcggttttggcagtacatcaatgggcgtggatagcggtttgactcacggggatttccaagtctccaccccattgacgtcaatgggagtttgttttggcaccaaaatcaacgggactttccaaaatgtcgtaacaactccgccccattgacgcaaatgggcggtaggcgtgtacggtgggaggtctatataagcagagctctctggctaactagagaacccactgcttactggcttatcgaaattaatacgactcactatagggagacccaagctgaaacttaagcttaccggtagccaccatggggcccaagaagaaaaggaaggtcggctccggcatgacacggttcgtccagctgcatctgctgacttcctaccctcccgcaaacctgaaccgggacgatctgggcaatcctaagacagccagactgggaggagtggagcggctgcgggtgagcagccagagcctgaagagggcatggcggacatccgagctgtttcagcagcagctggccggcaccatcggcaccagaacaaagaggctgggcatcgaggtgttcgaggccctgctgggagccggagtgaccgagaagcaggcaagagagtgggcaggacagatcgccaaggtgtatggagccgccaagaaggataacccactggagatcgagcagctggtgcacatcgcccccgaggagagggccagcctggaccagctggtggccacactggccgcagagaagaggggaccaaccgacgaggagctggatgccctgctgcaccaccagacagccgtggacatcgccatgtttggccggatgctggccagcaagacccagttcaatggagaggcagcagtgcaggtggcacacgcaatcggagtgcacgcctccgccatcgaggacgattacttcaccgccgtggacgatctgaacagaaatgatccaggagccgcacacatcggagagtccggctttgcagccgccgtgttctaccagtatatctgcatcgaccgggatctgctgaagagaaacctgggcggcgacgaggtgctgacacagaaggccctgagggccctgaccgaggccgccctgaaggtcggacctagcggcaagcagaacagcttcgccagcagggcctttgcccacttcgccctggccgagaagggcacagatcagcctagaagcctgtccctggccttcgtgaagccagtggccggcaccgactacgcaggcgatgcagtggccgccctgcagcaggtgcgggacaacatggataaggtgtatggcgtgtgcgccgagagcagatgtcagtttaatgtgctgacaggcgagggctccgtggcagacctgctggatttcgtggcagcagaggctagctcgccagggatccgtcgacttgacgcgttgatatcaacaagtttgtacaaaaaagcaggctacaaagaggccagcggttccggacgggctgacgcattggacgattttgatctggatatgctgggaagtgacgccctcgatgattttgaccttgacatgcttggttcggatgcccttgatgactttgacctcgacatgctcggcagtgacgcccttgatgatttcgacctggacatgctgattaactctagaggcggcgagggaaggggctctctgctgacctgcggcgacgtggaggagaaccctggacctggaccgaaaaagaagcgaaaagttggatccggcatgaagcctcgcaagccacggctgaatgaggcccagcagagatgggtgagggattggtggagggccctgcagccaagggcagagggcgacgagcctatcccaggcgagctgagcgtgatgggaaggggagagcgggcccagctgcggagatgtaccgacgccgatgagctgctgacacagtccgccaccctgctgctggcccacaggctggtggccctgaacggagagaggggaccactgcctgataattctctgagctatgagaggatggcatgggtggcaggcgtgctggccaacgtgaaggacgatctgcgcgatggcaagtccctggccacccacctgggacaggcagcagacgccgagaggccacccatgtctgagctgcgctttcgggcaatgcagaggggcacagcaatgcaggagctgttcctgcactggaggcgcgccctgcagctggccggaggcaagaccgacgtggcacacctggcagacgatctgctgagctggcagatcgagcagggacagagcgccgcacaggcctccaatggcgtgaagtttcactgggcctacgactactatctgtctgccagagatagggccgccgccaaggagcctgagttcaacaaggagatatccaaggggtccggcgaaggaaggggcagcctgctgacatgcggcgatgtggaggagaaccctggacctgctccaaaaaagaaacgcaaggtgggcagcggcatgaccgactacctgctgctgagactgtatggcccactggcctcctggggagagatcgcagtgggagagagcaggcactccgccgtgcagccatccagatctgccctgctgggcctgctgggggccgccctgggcatcgagagacacgacgatgcagcacagcaggccctggtggatggctacaggttcgccatcaagctggagtgtatcggctctcccctgcgcgactatcacaccgtgcaagtgggcgtgccccctaggaagttccagtttagaagccggagacaggagctggccgcagacaaggtggatacaatcctgtctaccagagagtataggtgcgatagcctggccctggtggcagtggaggccctgccaggggcccccgtggacctggccagcctggccgaggccctgcgcaagcctaggtttgccctgtacctgggaaggaagtcctgtccactggccctgccactgtctcccaagatcctggccgcctctagcgtgagagaggtgttcgataacctggagctgccctctctgctgggcctgctggacagataccagccagagcaggcctggccaagcaggcaggatcagcaggccctgaggcctggagtggcaaggtactattgggaggacggcatgacagcaggaatggccccctcctttgaggcacagaggcacgatcagcctctgtctcggcggcggtggcagttcgcaccaagaagggagtgggtggccctgaacgatggaggacagagcggctcgagcgagggaaggggctccctgctgacttgtggcgacgtggaggagaaccctggacctagccctaaaaaaaagcggaaggtaggtaccggcatgagccactatttttccctggtgaggctgatcggctctcccaggcacgacgcatggctgcgggatctgagcagacacggcgaggcctaccgggaccacgcactgatctggagactgttcccaggcgacggagccgcaagggatttcgtgtttcgccggctggaggatgagaagtctttttatgtggtgagcgccagacctccacaggcagacgcaggcctgttccacatccagtctaaggcctacagccctgagctggccgagggcgactgggtgaggttcgatctgcgcgccaacccaacagtgagcgtgagaagggagaatggcagatcccagaggcacgatgtgctgatgcacgccaagcagctggcctccaccgagaagtctgccctgcccgagcggctggaggcagcaggaagagagtggctgaaggacagggcagagcggtggggcctggacctgagaaccgattccctgatgcagaacggctacagacagcagaggctgaagcgcaagggcaagcacatcgccttttctacactggactatcagggcatcgcccaagtgaccgatcctgagcagctgcgccgggccctgctggacggagtgggacactccaagggattcggatgcggcctgctgctggtgaagagggtggatggtaaccaggagggaagaggctccctgctgacatgtggcgacgtggaagaaaaccctggacctggcccgaagaaaaaacgtaaagtgggctccggaatggacctgctgtccgatacatggctgcagtgcaggcacagggacggcaccctgaagcctatcgccatcggccagatcggcctggaggactgtctggagctggtggccccccggcccgacttccggggggccctgtaccagttcctgatcggcctgctgcagacagcctatgcccctgaggacctgcaggagtggagagataggtacgcaaacccaccaaccgcagacgatctggcagaggtgtttgccccctatagggatgccttccagctggagaacagcggccctacattcatgcaggacctgaccctgcccgacgatgtgaatcagctgcctgtgctggagctgctgatcgacgccggcagctcctctaaccagtactttaataagcctgcagtggagcacggaatgtgcgagggctgtttcacacaggccctgctgaccatgcagctgaatgcaccatctggcggaaggggcatcagaacaagcctgcgcggaggaggaccactgaccacactgctggtgcccgcagagcagaacgccaccctgtggcagaagctgtggctgaatgtgctgccactggacgcactggatcaccctccaatcaagatgctgtccgatgtgctgccctggctggcccctaccaggacatctgacgataagcagggccaggacacaccccctgagagcgtgcacccactgcaggcctactggtccatgccaaggcggatcagactggacgcagccaccctggaccagggcgattgcgccgtgtgcggggcccagaacgtgaagcgcatccggcactacagaacaaggcacggcggcaccaattataccggcacatggacccaccctctgaccccatatagcctggattccaagggcgagaagccaccactgagcatcaagggcaggcaggcaggaaggggctaccgcgactggctgggcctggtgctgggaaacgaggaccaccagccagatgcagcacaggtggtgcggcacttcacagcaaagctgggcaagccttccgtgagactgtggtgctttggcttcgacatgtctaatatgaaggccctgtgctggtacgatagcctgctgcctgtgcacggcgtggccccagacgtgcagaggaagtttacccgcagcgtgaagcaggtgctggacagcgccaacgatatggcctccgtgctgcacaagcaggtgaaggcagcatggttcagaaggcctggcgacgcaggacaggagccagcagtgacacagagcttttggcagggcagcgagacagccttctatcaggtgctggagcagctgtctaagctggactttgatagcgccgcagagctggccgcaatctacagggcatggctgcaggcaacacgccggctggtgctgtccctgttcgatcactgggtgctgtctggccccctggaggacatggatatgcagagggtggtgaaggcaagagcagacctggccaaggagctgaataccgggaaagcccagaagccactgtggactattgtgaaccagcatctgaaagagcagggttaacgatagaattctctagagggcccgtttaaacccgctgatcagcctcgactgtgccttctagttgccagccatctgttgtttgcccctcccccgtgccttccttgaccctggaaggtgccactcccactgtcctttcctaataaaatgaggaaattgcatcgcattgtctgagtaggtgtcattctattctggggggtggggtggggcaggacagcaagggggaggattgggaagacaatagcaggcatgctggggatgcggtgggctctatggcttctgaggcggaaagaaccagctggggctctagggggtatccccacgcgccctgtagcggcgcattaagcgcggcgggtgtggtggttacgcgcagcgtgaccgctacacttgccagcgccctagcgcccgctcctttcgctttcttcccttcctttctcgccacgttcgccggctttccccgtcaagctctaaatcgggggctccctttagggttccgatttagtgctttacggcacctcgaccccaaaaaacttgattagggtgatggttcacgtagtgggccatcgccctgatagacggtttttcgccctttgacgttggagtccacgttctttaatagtggactcttgttccaaactggaacaacactcaaccctatctcggtctattcttttgatttataagggattttgccgatttcggcctattggttaaaaaatgagctgatttaacaaaaatttaacgcgaattaattctgtggaatgtgtgtcagttagggtgtggaaagtccccaggctccccagcaggcagaagtatgcaaagcatgcatctcaattagtcagcaaccaggtgtggaaagtccccaggctccccagcaggcagaagtatgcaaagcatgcatctcaattagtcagcaaccatagtcccgcccctaactccgcccatcccgcccctaactccgcccagttccgcccattctccgccccatggctgactaattttttttatttatgcagaggccgaggccgcctctgcctctgagctattccagaagtagtgaggaggcttttttggaggcctaggcttttgcaaaaagctcccgggagcttgtatatccattttcggatctgatcaagagacaggatgaggatcgtttcgcatgattgaacaagatggattgcacgcaggttctccggccgcttgggtggagaggctattcggctatgactgggcacaacagacaatcggctgctctgatgccgccgtgttccggctgtcagcgcaggggcgcccggttctttttgtcaagaccgacctgtccggtgccctgaatgaactgcaggacgaggcagcgcggctatcgtggctggccacgacgggcgttccttgcgcagctgtgctcgacgttgtcactgaagcgggaagggactggctgctattgggcgaagtgccggggcaggatctcctgtcatctcaccttgctcctgccgagaaagtatccatcatggctgatgcaatgcggcggctgcatacgcttgatccggctacctgcccattcgaccaccaagcgaaacatcgcatcgagcgagcacgtactcggatggaagccggtcttgtcgatcaggatgatctggacgaagagcatcaggggctcgcgccagccgaactgttcgccaggctcaaggcgcgcatgcccgacggcgaggatctcgtcgtgacccatggcgatgcctgcttgccgaatatcatggtggaaaatggccgcttttctggattcatcgactgtggccggctgggtgtggcggaccgctatcaggacatagcgttggctacccgtgatattgctgaagagcttggcggcgaatgggctgaccgcttcctcgtgctttacggtatcgccgctcccgattcgcagcgcatcgccttctatcgccttcttgacgagttcttctgagcgggactctggggttcgaaatgaccgaccaagcgacgcccaacctgccatcacgagatttcgattccaccgccgccttctatgaaaggttgggcttcggaatcgttttccgggacgccggctggatgatcctccagcgcggggatctcatgctggagttcttcgcccaccccaacttgtttattgcagcttataatggttacaaataaagcaatagcatcacaaatttcacaaataaagcatttttttcactgcattctagttgtggtttgtccaaactcatcaatgtatcttatcatgtctgtataccgtcgacctctagctagagcttggcgtaatcatggtcatagctgtttcctgtgtgaaattgttatccgctcacaattccacacaacatacgagccggaagcataaagtgtaaagcctggggtgcctaatgagtgagctaactcacattaattgcgttgcgctcactgcccgctttccagtcgggaaacctgtcgtgccagctgcattaatgaatcggccaacgcgcggggagaggcggtttgcgtattgggcgctcttccgcttcctcgctcactgactcgctgcgctcggtcgttcggctgcggcgagcggtatcagctcactcaaaggcggtaatacggttatccacagaatcaggggataacgcaggaaagaacatgtgagcaaaaggccagcaaaaggccaggaaccgtaaaaaggccgcgttgctggcgtttttccataggctccgcccccctgacgagcatcacaaaaatcgacgctcaagtcagaggtggcgaaacccgacaggactataaagataccaggcgtttccccctggaagctccctcgtgcgctctcctgttccgaccctgccgcttaccggatacctgtccgcctttctcccttcgggaagcgtggcgctttctcatagctcacgctgtaggtatctcagttcggtgtaggtcgttcgctccaagctgggctgtgtgcacgaaccccccgttcagcccgaccgctgcgccttatccggtaactatcgtcttgagtccaacccggtaagacacgacttatcgccactggcagcagccactggtaacaggattagcagagcgaggtatgtaggcggtgctacagagttcttgaagtggtggcctaactacggctacactagaagaacagtatttggtatctgcgctctgctgaagccagttaccttcggaaaaagagttggtagctcttgatccggcaaacaaaccaccgctggtagcggtttttttgtttgcaagcagcagattacgcgcagaaaaaaaggatctcaagaagatcctttgatcttttctacggggtctgacgctcagtggaacgaaaactcacgttaagggattttggtcatgagattatcaaaaaggatcttcacctagatccttttaaattaaaaatgaagttttaaatcaatctaaagtatatatgagtaaacttggtctgacagttaccaatgcttaatcagtgaggcacctatctcagcgatctgtctatttcgttcatccatagttgcctgactccccgtcgtgtagataactacgatacgggagggcttaccatctggccccagtgctgcaatgataccgcgagacccacgctcaccggctccagatttatcagcaataaaccagccagccggaagggccgagcgcagaagtggtcctgcaactttatccgcctccatccagtctattaattgttgccgggaagctagagtaagtagttcgccagttaatagtttgcgcaacgttgttgccattgctacaggcatcgtggtgtcacgctcgtcgtttggtatggcttcattcagctccggttcccaacgatcaaggcgagttacatgatcccccatgttgtgcaaaaaagcggttagctccttcggtcctccgatcgttgtcagaagtaagttggccgcagtgttatcactcatggttatggcagcactgcataattctcttactgtcatgccatccgtaagatgcttttctgtgactggtgagtactcaaccaagtcattctgagaatagtgtatgcggcgaccgagttgctcttgcccggcgtcaatacgggataataccgcgccacatagcagaactttaaaagtgctcatcattggaaaacgttcttcggggcgaaaactctcaaggatcttaccgctgttgagatccagttcgatgtaacccactcgtgcacccaactgatcttcagcatcttttactttcaccagcgtttctgggtgagcaaaaacaggaaggcaaaatgccgcaaaaaagggaataagggcgacacggaaatgttgaatactcatactcttcctttttcaatattattgaagcatttatcagggttattgtctcatgagcggatacatatttgaatgtatttagaaaaataaacaaataggggttccgcgcacatttccccgaaaagtgccacctgacgtc

SEQ ID NO: 14 - DNA, 4796 bp, synthetic construct
  source 1..4796: mol_type = other DNA
gacggatcgggagatctcccgatcccctatggtcgactctcagtacaatctgctctgatgccgcatagttaagccagtatctgctccctgcttgtgtgttggaggtcgctgagtagtgcgcgagcaaaatttaagctacaacaaggcaaggcttgaccgacaattgcatgaagaatctgcttagggttaggcgttttgcgctgcttcgcgatgtacgggccagatatacgcgagggcctatttcccatgattccttcatatttgcatatacgatacaaggctgttagagagataattagaattaatttgactgtaaacacaaagatattagtacaaaatacgtgacgtagaaagtaataatttcttgggtagtttgcagttttaaaattatgttttaaaatggactatcatatgcttaccgtaacttgaaagtatttcgatttcttggctttatatatcttgtggaaaggacgaaacaccgtaatacgactcactatagggtctagaattcgtgttccccgcacctgcggggatgaaccgtaagttgtgttcttctttgcctaggccttcaggtgttccccgcacctgcggggatgaaccggcggccgctttttttcttctgaggcggaaagaaccagctggggctctagggggtatccccacgcgccctgtagcggcgcattaagcgcggcgggtgtggtggttacgcgcagcgtgaccgctacacttgccagcgccctagcgcccgctcctttcgctttcttcccttcctttctcgccacgttcgccggctttccccgtcaagctctaaatcggggcatccctttagggttccgatttagtgctttacggcacctcgaccccaaaaaacttgattagggtgatggttcacgtagtgggccatcgccctgatagacggtttttcgccctttgacgttggagtccacgttctttaatagtggactcttgttccaaactggaacaacactcaaccctatctcggtctattcttttgatttataagggattttggggatttcggcctattggttaaaaaatgagctgatttaacaaaaatttaacgcgaattaattctgtggaatgtgtgtcagttagggtgtggaaagtccccaggctccccaggcaggcagaagtatgcaaagcatgcatctcaattagtcagcaaccaggtgtggaaagtccccaggctccccagcaggcagaagtatgcaaagcatgcatctcaattagtcagcaaccatagtcccgcccctaactccgcccatcccgcccctaactccgcccagttccgcccattctccgccccatggctgactaattttttttatttatgcagaggccgaggccgcctctgcctctgagctattccagaagtagtgaggaggcttttttggaggcctaggcttttgcaaaaagctcccgggagcttgtatatccattttcggatctgatcaagagacaggatgaggatcgtttcgcatgattgaacaagatggattgcacgcaggttctccggccgcttgggtggagaggctattcggctatgactgggcacaacagacaatcggctgctctgatgccgccgtgttccggctgtcagcgcaggggcgcccggttctttttgtcaagaccgacctgtccggtgccctgaatgaactgcaggacgaggcagcgcggctatcgtggctggccacgacgggcgttccttgcgcagctgtgctcgacgttgtcactgaagcgggaagggactggctgctattgggcgaagtgccggggcaggatctcctgtcatctcaccttgctcctgccgagaaagtatccatcatggctgatgcaatgcggcggctgcatacgcttgatccggctacctgcccattcgaccaccaagcgaaacatcgcatcgagcgagcacgtactcggatggaagccggtcttgtcgatcaggatgatctggacgaagagcatcaggggctcgcgccagccgaactgttcgccaggctcaaggcgcgcatgcccgacggcgaggatctcgtcgtgacccatggcgatgcctgcttgccgaatatcatggtggaaaatggccgcttttctggattcatcgactgtggccggctgggtgtggcggaccgctatcaggacatagcgttggctacccgtgatattgctgaagagcttggcggcgaatgggctgaccgcttcctcgtgctttacggtatcgccgctcccgattcgcagcgcatcgccttctatcgccttcttgacgagttcttctgagcgggactctggggttcgaaatgaccgaccaagcgacgcccaacctgccatcacgagatttcgattccaccgccgccttctatgaaaggttgggcttcggaatcgttttccgggacgccggctggatgatcctccagcgcggggatctcatgctggagttcttcgcccaccccaacttgtttattgcagcttataatggttacaaataaagcaatagcatcacaaatttcacaaataaagcatttttttcactgcattctagttgtggtttgtccaaactcatcaatgtatcttatcatgtctgtataccgtcgacctctagctagagcttggcgtaatcatggtcatagctgtttcctgtgtgaaattgttatccgctcacaattccacacaacatacgagccggaagcataaagtgtaaagcctggggtgcctaatgagtgagctaactcacattaattgcgttgcgctcactgcccgctttccagtcgggaaacctgtcgtgccagctgcattaatgaatcggccaacgcgcggggagaggcggtttgcgtattgggcgctcttccgcttcctcgctcactgactcgctgcgctcggtcgttcggctgcggcgagcggtatcagctcactcaaaggcggtaatacggttatccacagaatcaggggataacgcaggaaagaacatgtgagcaaaaggccagcaaaaggccaggaaccgtaaaaaggccgcgttgctggcgtttttccataggctccgcccccctgacgagcatcacaaaaatcgacgctcaagtcagaggtggcgaaacccgacaggactataaagataccaggcgtttccccctggaagctccctcgtgcgctctcctgttccgaccctgccgcttaccggatacctgtccgcctttctcccttcgggaagcgtggcgctttctcaatgctcacgctgtaggtatctcagttcggtgtaggtcgttcgctccaagctgggctgtgtgcacgaaccccccgttcagcccgaccgctgcgccttatccggtaactatcgtcttgagtccaacccggtaagacacgacttatcgccactggcagcagccactggtaacaggattagcagagcgaggtatgtaggcggtgctacagagttcttgaagtggtggcctaactacggctacactagaaggacagtatttggtatctgcgctctgctgaagccagttaccttcggaaaaagagttggtagctcttgatccggcaaacaaaccaccgctggtagcggtggtttttttgtttgcaagcagcagattacgcgcagaaaaaaaggatctcaagaagatcctttgatcttttctacggggtctgacgctcagtggaacgaaaactcacgttaagggattttggtcatgagattatcaaaaaggatcttcacctagatccttttaaattaaaaatgaagttttaaatcaatctaaagtatatatgagtaaacttggtctgacagttaccaatgcttaatcagtgaggcacctatctcagcgatctgtctatttcgttcatccatagttgcctgactccccgtcgtgtagataactacgatacgggagggcttaccatctggccccagtgctgcaatgataccgcgagacccacgctcaccggctccagatttatcagcaataaaccagccagccggaagggccgagcgcagaagtggtcctgcaactttatccgcctccatccagtctattaattgttgccgggaagctagagtaagtagttcgccagttaatagtttgcgcaacgttgttgccattgctacaggcatcgtggtgtcacgctcgtcgtttggtatggcttcattcagctccggttcccaacgatcaaggcgagttacatgatcccccatgttgtgcaaaaaagcggttagctccttcggtcctccgatcgttgtcagaagtaagttggccgcagtgttatcactcatggttatggcagcactgcataattctcttactgtcatgccatccgtaagatgcttttctgtgactggtgagtactcaaccaagtcattctgagaatagtgtatgcggcgaccgagttgctcttgcccggcgtcaatacgggataataccgcgccacatagcagaactttaaaagtgctcatcattggaaaacgttcttcggggcgaaaactctcaaggatcttaccgctgttgagatccagttcgatgtaacccactcgtgcacccaactgatcttcagcatcttttactttcaccagcgtttctgggtgagcaaaaacaggaaggcaaaatgccgcaaaaaagggaataagggcgacacggaaatgttgaatactcatactcttcctttttcattattattgaagcatttatcagggttattgtctcatgagcggatacatatttgaatgtatttagaaaaataaacaaataggggttccgcgcacatttccccgaaaagtgccacctgacgtc

SEQ ID NO: 15 - DNA, 4796 bp, synthetic construct
  source 1..4796: mol_type = other DNA
gacggatcgggagatctcccgatcccctatggtcgactctcagtacaatctgctctgatgccgcatagttaagccagtatctgctccctgcttgtgtgttggaggtcgctgagtagtgcgcgagcaaaatttaagctacaacaaggcaaggcttgaccgacaattgcatgaagaatctgcttagggttaggcgttttgcgctgcttcgcgatgtacgggccagatatacgcgagggcctatttcccatgattccttcatatttgcatatacgatacaaggctgttagagagataattagaattaatttgactgtaaacacaaagatattagtacaaaatacgtgacgtagaaagtaataatttcttgggtagtttgcagttttaaaattatgttttaaaatggactatcatatgcttaccgtaacttgaaagtatttcgatttcttggctttatatatcttgtggaaaggacgaaacaccgtaatacgactcactatagggtctagaattcgtgttccccgcacctgcggggatgaaccgacgaagtggaggaggacacgggcaatgaacttgtgttccccgcacctgcggggatgaaccggcggccgctttttttcttctgaggcggaaagaaccagctggggctctagggggtatccccacgcgccctgtagcggcgcattaagcgcggcgggtgtggtggttacgcgcagcgtgaccgctacacttgccagcgccctagcgcccgctcctttcgctttcttcccttcctttctcgccacgttcgccggctttccccgtcaagctctaaatcggggcatccctttagggttccgatttagtgctttacggcacctcgaccccaaaaaacttgattagggtgatggttcacgtagtgggccatcgccctgatagacggtttttcgccctttgacgttggagtccacgttctttaatagtggactcttgttccaaactggaacaacactcaaccctatctcggtctattcttttgatttataagggattttggggatttcggcctattggttaaaaaatgagctgatttaacaaaaatttaacgcgaattaattctgtggaatgtgtgtcagttagggtgtggaaagtccccaggctccccaggcaggcagaagtatgcaaagcatgcatctcaattagtcagcaaccaggtgtggaaagtccccaggctccccagcaggcagaagtatgcaaagcatgcatctcaattagtcagcaaccatagtcccgcccctaactccgcccatcccgcccctaactccgcccagttccgcccattctccgccccatggctgactaattttttttatttatgcagaggccgaggccgcctctgcctctgagctattccagaagtagtgaggaggcttttttggaggcctaggcttttgcaaaaagctcccgggagcttgtatatccattttcggatctgatcaagagacaggatgaggatcgtttcgcatgattgaacaagatggattgcacgcaggttctccggccgcttgggtggagaggctattcggctatgactgggcacaacagacaatcggctgctctgatgccgccgtgttccggctgtcagcgcaggggcgcccggttctttttgtcaagaccgacctgtccggtgccctgaatgaactgcaggacgaggcagcgcggctatcgtggctggccacgacgggcgttccttgcgcagctgtgctcgacgttgtcactgaagcgggaagggactggctgctattgggcgaagtgccggggcaggatctcctgtcatctcaccttgctcctgccgagaaagtatccatcatggctgatgcaatgcggcggctgcatacgcttgatccggctacctgcccattcgaccaccaagcgaaacatcgcatcgagcgagcacgtactcggatggaagccggtcttgtcgatcaggatgatctggacgaagagcatcaggggctcgcgccagccgaactgttcgccaggctcaaggcgcgcatgcccgacggcgaggatctcgtcgtgacccatggcgatgcctgcttgccgaatatcatggtggaaaatggccgcttttctggattcatcgactgtggccggctgggtgtggcggaccgctatcaggacatagcgttggctacccgtgatattgctgaagagcttggcggcgaatgggctgaccgcttcctcgtgctttacggtatcgccgctcccgattcgcagcgcatcgccttctatcgccttcttgacgagttcttctgagcgggactctggggttcgaaatgaccgaccaagcgacgcccaacctgccatcacgagatttcgattccaccgccgccttctatgaaaggttgggcttcggaatcgttttccgggacgccggctggatgatcctccagcgcggggatctcatgctggagttcttcgcccaccccaacttgtttattgcagcttataatggttacaaataaagcaatagcatcacaaatttcacaaataaagcatttttttcactgcattctagttgtggtttgtccaaactcatcaatgtatcttatcatgtctgtataccgtcgacctctagctagagcttggcgtaatcatggtcatagctgtttcctgtgtgaaattgttatccgctcacaattccacacaacatacgagccggaagcataaagtgtaaagcctggggtgcctaatgagtgagctaactcacattaattgcgttgcgctcactgcccgctttccagtcgggaaacctgtcgtgccagctgcattaatgaatcggccaacgcgcggggagaggcggtttgcgtattgggcgctcttccgcttcctcgctcactgactcgctgcgctcggtcgttcggctgcggcgagcggtatcagctcactcaaaggcggtaatacggttatccacagaatcaggggataacgcaggaaagaacatgtgagcaaaaggccagcaaaaggccaggaaccgtaaaaaggccgcgttgctggcgtttttccataggctccgcccccctgacgagcatcacaaaaatcgacgctcaagtcagaggtggcgaaacccgacaggactataaagataccaggcgtttccccctggaagctccctcgtgcgctctcctgttccgaccctgccgcttaccggatacctgtccgcctttctcccttcgggaagcgtggcgctttctcaatgctcacgctgtaggtatctcagttcggtgtaggtcgttcgctccaagctgggctgtgtgcacgaaccccccgttcagcccgaccgctgcgccttatccggtaactatcgtcttgagtccaacccggtaagacacgacttatcgccactggcagcagccactggtaacaggattagcagagcgaggtatgtaggcggtgctacagagttcttgaagtggtggcctaactacggctacactagaaggacagtatttggtatctgcgctctgctgaagccagttaccttcggaaaaagagttggtagctcttgatccggcaaacaaaccaccgctggtagcggtggtttttttgtttgcaagcagcagattacgcgcagaaaaaaaggatctcaagaagatcctttgatcttttctacggggtctgacgctcagtggaacgaaaactcacgttaagggattttggtcatgagattatcaaaaaggatcttcacctagatccttttaaattaaaaatgaagttttaaatcaatctaaagtatatatgagtaaacttggtctgacagttaccaatgcttaatcagtgaggcacctatctcagcgatctgtctatttcgttcatccatagttgcctgactccccgtcgtgtagataactacgatacgggagggcttaccatctggccccagtgctgcaatgataccgcgagacccacgctcaccggctccagatttatcagcaataaaccagccagccggaagggccgagcgcagaagtggtcctgcaactttatccgcctccatccagtctattaattgttgccgggaagctagagtaagtagttcgccagttaatagtttgcgcaacgttgttgccattgctacaggcatcgtggtgtcacgctcgtcgtttggtatggcttcattcagctccggttcccaacgatcaaggcgagttacatgatcccccatgttgtgcaaaaaagcggttagctccttcggtcctccgatcgttgtcagaagtaagttggccgcagtgttatcactcatggttatggcagcactgcataattctcttactgtcatgccatccgtaagatgcttttctgtgactggtgagtactcaaccaagtcattctgagaatagtgtatgcggcgaccgagttgctcttgcccggcgtcaatacgggataataccgcgccacatagcagaactttaaaagtgctcatcattggaaaacgttcttcggggcgaaaactctcaaggatcttaccgctgttgagatccagttcgatgtaacccactcgtgcacccaactgatcttcagcatcttttactttcaccagcgtttctgggtgagcaaaaacaggaaggcaaaatgccgcaaaaaagggaataagggcgacacggaaatgttgaatactcatactcttcctttttcattattattgaagcatttatcagggttattgtctcatgagcggatacatatttgaatgtatttagaaaaataaacaaataggggttccgcgcacatttccccgaaaagtgccacctgacgtc

SEQ ID NO: 16 - DNA, 5922 bp, synthetic construct
  source 1..5922: mol_type = other DNA
cttcggaaaaagagttggtagctcttgatccggcaaacaaaccaccgctggtagcggtggtttttttgtttgcaagcagcagattacgcgcagaaaaaaaggatctcaagaagatcctttgatcttttctacggggtctgacgctcagtggaacgaaaactcacgttaagggattttggtcatgagattatcaaaaaggatcttcacctagatccttttaaattaaaaatgaagttttaaatcaatctaaagtatatatgagtaaacttggtctgacagttaccaatgcttaatcagtgaggcacctatctcagcgatctgtctatttcgttcatccatagttgcctgactccccgtcgtgtagataactacgatacgggagggcttaccatctggccccagtgctgcaatgataccgcgagacccacgctcaccggctccagatttatcagcaataaaccagccagccggaagggccgagcgcagaagtggtcctgcaactttatccgcctccatccagtctattaattgttgccgggaagctagagtaagtagttcgccagttaatagtttgcgcaacgttgttgccattgctacaggcatcgtggtgtcacgctcgtcgtttggtatggcttcattcagctccggttcccaacgatcaaggcgagttacatgatcccccatgttgtgcaaaaaagcggttagctccttcggtcctccgatcgttgtcagaagtaagttggccgcagtgttatcactcatggttatggcagcactgcataattctcttactgtcatgccatccgtaagatgcttttctgtgactggtgagtactcaaccaagtcattctgagaatagtgtatgcggcgaccgagttgctcttgcccggcgtcaatacgggataataccgcgccacatagcagaactttaaaagtgctcatcattggaaaacgttcttcggggcgaaaactctcaaggatcttaccgctgttgagatccagttcgatgtaacccactcgtgcacccaactgatcttcagcatcttttactttcaccagcgtttctgggtgagcaaaaacaggaaggcaaaatgccgcaaaaaagggaataagggcgacacggaaatgttgaatactcatactcttcctttttcaatattattgaagcatttatcagggttattgtctcatgagcggatacatatttgaatgtatttagaaaaataaacaaataggggttccgcgcacatttccccgaaaagtgccacctgacgtcgacggatcgggagatctcccgatcccctatggtgcactctcagtacaatctgctctgatgccgcatagttaagccagtatctgctccctgcttgtgtgttggaggtcgctgagtagtgcgcgagcaaaatttaagctacaacaaggcaaggcttgaccgacaattgcatgaagaatctgcttagggttaggcgttttgcgctgcttcgcgatgtacgggccagatatacgcgttgacattgattattgactagttattaatagtaatcaattacggggtcattagttcatagcccatatatggagttccgcgttacataacttacggtaaatggcccgcctggctgaccgcccaacgacccccgcccattgacgtcaataatgacgtatgttcccatagtaacgccaatagggactttccattgacgtcaatgggtggagtatttacggtaaactgcccacttggcagtacatcaagtgtatcatatgccaagtacgccccctattgacgtcaatgacggtaaatggcccgcctggcattatgcccagtacatgaccttatgggactttcctacttggcagtacatctacgtattagtcatcgctattaccatggtgatgcggttttggcagtacatcaatgggcgtggatagcggtttgactcacggggatttccaagtctccaccccattgacgtcaatgggagtttgttttggcaccaaaatcaacgggactttccaaaatgtcgtaacaactccgccccattgacgcaaatgggcggtaggcgtgtacggtgggaggtctatataagcagagctctctggctaactagagaacccactgcttactggcttatcgaaattaatacgactcactatagggagacccaagctggctagcgtgttccccgcacctgcggggatgaaccgggatccatggtgagcaagggcgaggagctgttcaccggggtggtgcccatcctggtcgagctggacggcgacgtaaacggccacaagttcagcgtgtccggcgagggcgagggcgatgccacctacggcaagctgaccctgaagttcatctgcaccaccggcaagctgcccgtgccctggcccaccctcgtgaccaccctgacctacggcgtgcagtgcttcagccgctaccccgaccacatgaagcagcacgacttcttcaagtccgccatgcccgaaggctacgtccaggagcgcaccatcttcttcaaggacgacggcaactacaagacccgcgccgaggtgaagttcgagggcgacaccctggtgaaccgcatcgagctgaagggcatcgacttcaaggaggacggcaacatcctggggcacaagctggagtacaactacaacagccacaacgtctatatcatggccgacaagcagaagaacggcatcaaggtgaacttcaagatccgccacaacatcgaggacggcagcgtgcagctcgccgaccactaccagcagaacacccccatcggcgacggccccgtgctgctgcccgacaaccactacctgagcacccagtccgccctgagcaaagaccccaacgagaagcgcgatcacatggtcctgctggagttcgtgaccgccgccgggatcactctcggcatggacgagctgtacaagaagcttagccatggcttcccgccggaggtggaggagcaggatgatggcacgctgcccatgtcttgtgcccaggagagcgggatggaccgtcaccctgcagcctgtgcttctgctaggatcaatgtgaagcgacctgccgccacaaagaaggctggacaggctaagaagaagaaatgagcggccgctcgagtctagagggcccgtttaaacccgctgatcagcctcgactgtgccttctagttgccagccatctgttgtttgcccctcccccgtgccttccttgaccctggaaggtgccactcccactgtcctttcctaataaaatgaggaaattgcatcgcattgtctgagtaggtgtcattctattctggggggtggggtggggcaggacagcaagggggaggattgggaagacaatagcaggcatgctggggatgcggtgggctctatggcttctgaggcggaaagaaccagctggggctctagggggtatccccacgcgccctgtagcggcgcattaagcgcggcgggtgtggtggttacgcgcagcgtgaccgctacacttgccagcgccctagcgcccgctcctttcgctttcttcccttcctttctcgccacgttcgccggctttccccgtcaagctctaaatcgggggctccctttagggttccgatttagtgctttacggcacctcgaccccaaaaaacttgattagggtgatggttcacgtacctagaagttcctattccgaagttcctattctctagaaagtataggaacttccttggccaaaaagcctgaactcaccgcgacgtctgtcgagaagtttctgatcgaaaagttcgacagcgtctccgacctgatgcagctctcggagggcgaagaatctcgtgctttcagcttcgatgtaggagggcgtggatatgtcctgcgggtaaatagctgcgccgatggtttctacaaagatcgttatgtttatcggcactttgcatcggccgcgctcccgattccggaagtgcttgacattggggaattcagcgagagcctgacctattgcatctcccgccgtgcacagggtgtcacgttgcaagacctgcctgaaaccgaactgcccgctgttctgcagccggtcgcggaggccatggatgcgatcgctgcggccgatcttagccagacgagcgggttcggcccattcggaccgcaaggaatcggtcaatacactacatggcgtgatttcatatgcgcgattgctgatccccatgtgtatcactggcaaactgtgatggacgacaccgtcagtgcgtccgtcgcgcaggctctcgatgagctgatgctttgggccgaggactgccccgaagtccggcacctcgtgcacgcggatttcggctccaacaatgtcctgacggacaatggccgcataacagcggtcattgactggagcgaggcgatgttcggggattcccaatacgaggtcgccaacatcttcttctggaggccgtggttggcttgtatggagcagcagacgcgctacttcgagcggaggcatccggagcttgcaggatcgccgcggctccgggcgtatatgctccgcattggtcttgaccaactctatcagagcttggttgacggcaatttcgatgatgcagcttgggcgcagggtcgatgcgacgcaatcgtccgatccggagccgggactgtcgggcgtacacaaatcgcccgcagaagcgcggccgtctggaccgatggctgtgtagaagtactcgccgatagtggaaaccgacgccccagcactcgtccgagggcaaaggaatagcacgtactacgagatttcgattccaccgccgccttctatgaaaggttgggcttcggaatcgttttccgggacgccggctggatgatcctccagcgcggggatctcatgctggagttcttcgcccaccccaacttgtttattgcagcttataatggttacaaataaagcaatagcatcacaaatttcacaaataaagcatttttttcactgcattctagttgtggtttgtccaaactcatcaatgtatcttatcatgtctgtataccgtcgacctctagctagagcttggcgtaatcatggtcatagctgtttcctgtgtgaaattgttatccgctcacaattccacacaacatacgagccggaagcataaagtgtaaagcctggggtgcctaatgagtgagctaactcacattaattgcgttgcgctcactgcccgctttccagtcgggaaacctgtcgtgccagctgcattaatgaatcggccaacgcgcggggagaggcggtttgcgtattgggcgctcttccgcttcctcgctcactgactcgctgcgctcggtcgttcggctgcggcgagcggtatcagctcactcaaaggcggtaatacggttatccacagaatcaggggataacgcaggaaagaacatgtgagcaaaaggccagcaaaaggccaggaaccgtaaaaaggccgcgttgctggcgtttttccataggctccgcccccctgacgagcatcacaaaaatcgacgctcaagtcagaggtggcgaaacccgacaggactataaagataccaggcgtttccccctggaagctccctcgtgcgctctcctgttccgaccctgccgcttaccggatacctgtccgcctttctcccttcgggaagcgtggcgctttctcatagctcacgctgtaggtatctcagttcggtgtaggtcgttcgctccaagctgggctgtgtgcacgaaccccccgttcagcccgaccgctgcgccttatccggtaactatcgtcttgagtccaacccggtaagacacgacttatcgccactggcagcagccactggtaacaggattagcagagcgaggtatgtaggcggtgctacagagttcttgaagtggtggcctaactacggctacactagaaggacagtatttggtatctgcgctctgctgaagccagttac

SEQ ID NO: 17 - DNA, 5921 bp, synthetic construct
  source 1..5921: mol_type = other DNA
cttcggaaaaagagttggtagctcttgatccggcaaacaaaccaccgctggtagcggtggtttttttgtttgcaagcagcagattacgcgcagaaaaaaaggatctcaagaagatcctttgatcttttctacggggtctgacgctcagtggaacgaaaactcacgttaagggattttggtcatgagattatcaaaaaggatcttcacctagatccttttaaattaaaaatgaagttttaaatcaatctaaagtatatatgagtaaacttggtctgacagttaccaatgcttaatcagtgaggcacctatctcagcgatctgtctatttcgttcatccatagttgcctgactccccgtcgtgtagataactacgatacgggagggcttaccatctggccccagtgctgcaatgataccgcgagacccacgctcaccggctccagatttatcagcaataaaccagccagccggaagggccgagcgcagaagtggtcctgcaactttatccgcctccatccagtctattaattgttgccgggaagctagagtaagtagttcgccagttaatagtttgcgcaacgttgttgccattgctacaggcatcgtggtgtcacgctcgtcgtttggtatggcttcattcagctccggttcccaacgatcaaggcgagttacatgatcccccatgttgtgcaaaaaagcggttagctccttcggtcctccgatcgttgtcagaagtaagttggccgcagtgttatcactcatggttatggcagcactgcataattctcttactgtcatgccatccgtaagatgcttttctgtgactggtgagtactcaaccaagtcattctgagaatagtgtatgcggcgaccgagttgctcttgcccggcgtcaatacgggataataccgcgccacatagcagaactttaaaagtgctcatcattggaaaacgttcttcggggcgaaaactctcaaggatcttaccgctgttgagatccagttcgatgtaacccactcgtgcacccaactgatcttcagcatcttttactttcaccagcgtttctgggtgagcaaaaacaggaaggcaaaatgccgcaaaaaagggaataagggcgacacggaaatgttgaatactcatactcttcctttttcaatattattgaagcatttatcagggttattgtctcatgagcggatacatatttgaatgtatttagaaaaataaacaaataggggttccgcgcacatttccccgaaaagtgccacctgacgtcgacggatcgggagatctcccgatcccctatggtgcactctcagtacaatctgctctgatgccgcatagttaagccagtatctgctccctgcttgtgtgttggaggtcgctgagtagtgcgcgagcaaaatttaagctacaacaaggcaaggcttgaccgacaattgcatgaagaatctgcttagggttaggcgttttgcgctgcttcgcgatgtacgggccagatatacgcgttgacattgattattgactagttattaatagtaatcaattacggggtcattagttcatagcccatatatggagttccgcgttacataacttacggtaaatggcccgcctggctgaccgcccaacgacccccgcccattgacgtcaataatgacgtatgttcccatagtaacgccaatagggactttccattgacgtcaatgggtggagtatttacggtaaactgcccacttggcagtacatcaagtgtatcatatgccaagtacgccccctattgacgtcaatgacggtaaatggcccgcctggcattatgcccagtacatgaccttatgggactttcctacttggcagtacatctacgtattagtcatcgctattaccatggtgatgcggttttggcagtacatcaatgggcgtggatagcggtttgactcacggggatttccaagtctccaccccattgacgtcaatgggagtttgttttggcaccaaaatcaacgggactttccaaaatgtcgtaacaactccgccccattgacgcaaatgggcggtaggcgtgtacggtgggaggtctatataagcagagctctctggctaactagagaacccactgcttactggcttatcgaaattaatacgactcactatagggagacccaagctggctagcgtgaactgccgagtaggtagctgataacggatccatggtgagcaagggcgaggagctgttcaccggggtggtgcccatcctggtcgagctggacggcgacgtaaacggccacaagttcagcgtgtccggcgagggcgagggcgatgccacctacggcaagctgaccctgaagttcatctgcaccaccggcaagctgcccgtgccctggcccaccctcgtgaccaccctgacctacggcgtgcagtgcttcagccgctaccccgaccacatgaagcagcacgacttcttcaagtccgccatgcccgaaggctacgtccaggagcgcaccatcttcttcaaggacgacggcaactacaagacccgcgccgaggtgaagttcgagggcgacaccctggtgaaccgcatcgagctgaagggcatcgacttcaaggaggacggcaacatcctggggcacaagctggagtacaactacaacagccacaacgtctatatcatggccgacaagcagaagaacggcatcaaggtgaacttcaagatccgccacaacatcgaggacggcagcgtgcagctcgccgaccactaccagcagaacacccccatcggcgacggccccgtgctgctgcccgacaaccactacctgagcacccagtccgccctgagcaaagaccccaacgagaagcgcgatcacatggtcctgctggagttcgtgaccgccgccgggatcactctcggcatggacgagctgtacaagaagcttagccatggcttcccgccggaggtggaggagcaggatgatggcacgctgcccatgtcttgtgcccaggagagcgggatggaccgtcaccctgcagcctgtgcttctgctaggatcaatgtgaagcgacctgccgccacaaagaaggctggacaggctaagaagaagaaatgagcggccgctcgagtctagagggcccgtttaaacccgctgatcagcctcgactgtgccttctagttgccagccatctgttgtttgcccctcccccgtgccttccttgaccctggaaggtgccactcccactgtcctttcctaataaaatgaggaaattgcatcgcattgtctgagtaggtgtcattctattctggggggtggggtggggcaggacagcaagggggaggattgggaagacaatagcaggcatgctggggatgcggtgggctctatggcttctgaggcggaaagaaccagctggggctctagggggtatccccacgcgccctgtagcggcgcattaagcgcggcgggtgtggtggttacgcgcagcgtgaccgctacacttgccagcgccctagcgcccgctcctttcgctttcttcccttcctttctcgccacgttcgccggctttccccgtcaagctctaaatcgggggctccctttagggttccgatttagtgctttacggcacctcgaccccaaaaaacttgattagggtgatggttcacgtacctagaagttcctattccgaagttcctattctctagaaagtataggaacttccttggccaaaaagcctgaactcaccgcgacgtctgtcgagaagtttctgatcgaaaagttcgacagcgtctccgacctgatgcagctctcggagggcgaagaatctcgtgctttcagcttcgatgtaggagggcgtggatatgtcctgcgggtaaatagctgcgccgatggtttctacaaagatcgttatgtttatcggcactttgcatcggccgcgctcccgattccggaagtgcttgacattggggaattcagcgagagcctgacctattgcatctcccgccgtgcacagggtgtcacgttgcaagacctgcctgaaaccgaactgcccgctgttctgcagccggtcgcggaggccatggatgcgatcgctgcggccgatcttagccagacgagcgggttcggcccattcggaccgcaaggaatcggtcaatacactacatggcgtgatttcatatgcgcgattgctgatccccatgtgtatcactggcaaactgtgatggacgacaccgtcagtgcgtccgtcgcgcaggctctcgatgagctgatgctttgggccgaggactgccccgaagtccggcacctcgtgcacgcggatttcggctccaacaatgtcctgacggacaatggccgcataacagcggtcattgactggagcgaggcgatgttcggggattcccaatacgaggtcgccaacatcttcttctggaggccgtggttggcttgtatggagcagcagacgcgctacttcgagcggaggcatccggagcttgcaggatcgccgcggctccgggcgtatatgctccgcattggtcttgaccaactctatcagagcttggttgacggcaatttcgatgatgcagcttgggcgcagggtcgatgcgacgcaatcgtccgatccggagccgggactgtcgggcgtacacaaatcgcccgcagaagcgcggccgtctggaccgatggctgtgtagaagtactcgccgatagtggaaaccgacgccccagcactcgtccgagggcaaaggaatagcacgtactacgagatttcgattccaccgccgccttctatgaaaggttgggcttcggaatcgttttccgggacgccggctggatgatcctccagcgcggggatctcatgctggagttcttcgcccaccccaacttgtttattgcagcttataatggttacaaataaagcaatagcatcacaaatttcacaaataaagcatttttttcactgcattctagttgtggtttgtccaaactcatcaatgtatcttatcatgtctgtataccgtcgacctctagctagagcttggcgtaatcatggtcatagctgtttcctgtgtgaaattgttatccgctcacaattccacacaacatacgagccggaagcataaagtgtaaagcctggggtgcctaatgagtgagctaactcacattaattgcgttgcgctcactgcccgctttccagtcgggaaacctgtcgtgccagctgcattaatgaatcggccaacgcgcggggagaggcggtttgcgtattgggcgctcttccgcttcctcgctcactgactcgctgcgctcggtcgttcggctgcggcgagcggtatcagctcactcaaaggcggtaatacggttatccacagaatcaggggataacgcaggaaagaacatgtgagcaaaaggccagcaaaaggccaggaaccgtaaaaaggccgcgttgctggcgtttttccataggctccgcccccctgacgagcatcacaaaaatcgacgctcaagtcagaggtggcgaaacccgacaggactataaagataccaggcgtttccccctggaagctccctcgtgcgctctcctgttccgaccctgccgcttaccggatacctgtccgcctttctcccttcgggaagcgtggcgctttctcatagctcacgctgtaggtatctcagttcggtgtaggtcgttcgctccaagctgggctgtgtgcacgaaccccccgttcagcccgaccgctgcgccttatccggtaactatcgtcttgagtccaacccggtaagacacgacttatcgccactggcagcagccactggtaacaggattagcagagcgaggtatgtaggcggtgctacagagttcttgaagtggtggcctaactacggctacactagaaggacagtatttggtatctgcgctctgctgaagccagttac

SEQ ID NO: 18 - DNA, 6108 bp, synthetic construct
  source 1..6108: mol_type = other DNA
gacggatcgggagatctcccgatcccctatggtcgactctcagtacaatctgctctgatgccgcatagttaagccagtatctgctccctgcttgtgtgttggaggtcgctgagtagtgcgcgagcaaaatttaagctacaacaaggcaaggcttgaccgacaattgcatgaagaatctgcttagggttaggcgttttgcgctgcttcgcgatgtacgggccagatatacgcgttgacattgattattgactagttattaatagtaatcaattacggggtcattagttcatagcccatatatggagttccgcgttacataacttacggtaaatggcccgcctggctgaccgcccaacgacccccgcccattgacgtcaataatgacgtatgttcccatagtaacgccaatagggactttccattgacgtcaatgggtggactatttacggtaaactgcccacttggcagtacatcaagtgtatcatatgccaagtacgccccctattgacgtcaatgacggtaaatggcccgcctggcattatgcccagtacatgaccttatgggactttcctacttggcagtacatctacgtattagtcatcgctattaccatggtgatgcggttttggcagtacatcaatgggcgtggatagcggtttgactcacggggatttccaagtctccaccccattgacgtcaatgggagtttgttttggcaccaaaatcaacgggactttccaaaatgtcgtaacaactccgccccattgacgcaaatgggcggtaggcgtgtacggtgggaggtctatataagcagagctctctggctaactagagaacccactgcttactggcttatcgaaattaatacgactcactatagggagacccaagcttggtaccgagctcggccaccatgggccctaaaaaaaagcggaaggtaggtaccggcatgagccactatttttccctggtgaggctgatcggctctcccaggcacgacgcatggctgcgggatctgagcagacacggcgaggcctaccgggaccacgcactgatctggagactgttcccaggcgacggagccgcaagggatttcgtgtttcgccggctggaggatgagaagtctttttatgtggtgagcgccagacctccacaggcagacgcaggcctgttccacatccagtctaaggcctacagccctgagctggccgagggcgactgggtgaggttcgatctgcgcgccaacccaacagtgagcgtgagaagggagaatggcagatcccagaggcacgatgtgctgatgcacgccaagcagctggcctccaccgagaagtctgccctgcccgagcggctggaggcagcaggaagagagtggctgaaggacagggcagagcggtggggcctggacctgagaaccgattccctgatgcagaacggctacagacagcagaggctgaagcgcaagggcaagcacatcgccttttctacactggactatcagggcatcgcccaagtgaccgatcctgagcagctgcgccgggccctgctggacggagtgggacactccaagggattcggatgcggcctgctgctggtgaagagggtggattgacctacttccaatccaatattggaagtggataatctagagggccctattctatagtgtcacctaaatgctagagctcgctgatcagcctcgactgtgccttctagttgccagccatctgttgtttgcccctcccccgtgccttccttgaccctggaaggtgccactcccactgtcctttcctaataaaatgaggaaattgcatcgcattgtctgagtaggtgtcattctattctggggggtggggtggggcaggacagcaagggggaggattgggaagacaatagcaggcatgctggggatgcggtgggctctatggcttctgaggcggaaagaaccagctggggctctagggggtatccccacgcgccctgtagcggcgcattaagcgcggcgggtgtggtggttacgcgcagcgtgaccgctacacttgccagcgccctagcgcccgctcctttcgctttcttcccttcctttctcgccacgttcgccggctttccccgtcaagctctaaatcggggcatccctttagggttccgatttagtgctttacggcacctcgaccccaaaaaacttgattagggtgatggttcacgtagtgggccatcgccctgatagacggtttttcgccctttgacgttggagtccacgttctttaatagtggactcttgttccaaactggaacaacactcaaccctatctcggtctattcttttgatttataagggattttggggatttcggcctattggttaaaaaatgagctgatttaacaaaaatttaacgcgaattaattctgtggaatgtgtgtcagttagggtgtggaaagtccccaggctccccaggcaggcagaagtatgcaaagcatgcatctcaattagtcagcaaccaggtgtggaaagtccccaggctccccagcaggcagaagtatgcaaagcatgcatctcaattagtcagcaaccatagtcccgcccctaactccgcccatcccgcccctaactccgcccagttccgcccattctccgccccatggctgactaattttttttatttatgcagaggccgaggccgcctctgcctctgagctattccagaagtagtgaggaggcttttttggaggcctaggcttttgcaaaaagctcccgggagcttgtatatccattttcggatctgatcaagagacaggatgaggatcgtttcgcatgattgaacaagatggattgcacgcaggttctccggccgcttgggtggagaggctattcggctatgactgggcacaacagacaatcggctgctctgatgccgccgtgttccggctgtcagcgcaggggcgcccggttctttttgtcaagaccgacctgtccggtgccctgaatgaactgcaggacgaggcagcgcggctatcgtggctggccacgacgggcgttccttgcgcagctgtgctcgacgttgtcactgaagcgggaagggactggctgctattgggcgaagtgccggggcaggatctcctgtcatctcaccttgctcctgccgagaaagtatccatcatggctgatgcaatgcggcggctgcatacgcttgatccggctacctgcccattcgaccaccaagcgaaacatcgcatcgagcgagcacgtactcggatggaagccggtcttgtcgatcaggatgatctggacgaagagcatcaggggctcgcgccagccgaactgttcgccaggctcaaggcgcgcatgcccgacggcgaggatctcgtcgtgacccatggcgatgcctgcttgccgaatatcatggtggaaaatggccgcttttctggattcatcgactgtggccggctgggtgtggcggaccgctatcaggacatagcgttggctacccgtgatattgctgaagagcttggcggcgaatgggctgaccgcttcctcgtgctttacggtatcgccgctcccgattcgcagcgcatcgccttctatcgccttcttgacgagttcttctgagcgggactctggggttcgaaatgaccgaccaagcgacgcccaacctgccatcacgagatttcgattccaccgccgccttctatgaaaggttgggcttcggaatcgttttccgggacgccggctggatgatcctccagcgcggggatctcatgctggagttcttcgcccaccccaacttgtttattgcagcttataatggttacaaataaagcaatagcatcacaaatttcacaaataaagcatttttttcactgcattctagttgtggtttgtccaaactcatcaatgtatcttatcatgtctgtataccgtcgacctctagctagagcttggcgtaatcatggtcatagctgtttcctgtgtgaaattgttatccgctcacaattccacacaacatacgagccggaagcataaagtgtaaagcctggggtgcctaatgagtgagctaactcacattaattgcgttgcgctcactgcccgctttccagtcgggaaacctgtcgtgccagctgcattaatgaatcggccaacgcgcggggagaggcggtttgcgtattgggcgctcttccgcttcctcgctcactgactcgctgcgctcggtcgttcggctgcggcgagcggtatcagctcactcaaaggcggtaatacggttatccacagaatcaggggataacgcaggaaagaacatgtgagcaaaaggccagcaaaaggccaggaaccgtaaaaaggccgcgttgctggcgtttttccataggctccgcccccctgacgagcatcacaaaaatcgacgctcaagtcagaggtggcgaaacccgacaggactataaagataccaggcgtttccccctggaagctccctcgtgcgctctcctgttccgaccctgccgcttaccggatacctgtccgcctttctcccttcgggaagcgtggcgctttctcaatgctcacgctgtaggtatctcagttcggtgtaggtcgttcgctccaagctgggctgtgtgcacgaaccccccgttcagcccgaccgctgcgccttatccggtaactatcgtcttgagtccaacccggtaagacacgacttatcgccactggcagcagccactggtaacaggattagcagagcgaggtatgtaggcggtgctacagagttcttgaagtggtggcctaactacggctacactagaaggacagtatttggtatctgcgctctgctgaagccagttaccttcggaaaaagagttggtagctcttgatccggcaaacaaaccaccgctggtagcggtggtttttttgtttgcaagcagcagattacgcgcagaaaaaaaggatctcaagaagatcctttgatcttttctacggggtctgacgctcagtggaacgaaaactcacgttaagggattttggtcatgagattatcaaaaaggatcttcacctagatccttttaaattaaaaatgaagttttaaatcaatctaaagtatatatgagtaaacttggtctgacagttaccaatgcttaatcagtgaggcacctatctcagcgatctgtctatttcgttcatccatagttgcctgactccccgtcgtgtagataactacgatacgggagggcttaccatctggccccagtgctgcaatgataccgcgagacccacgctcaccggctccagatttatcagcaataaaccagccagccggaagggccgagcgcagaagtggtcctgcaactttatccgcctccatccagtctattaattgttgccgggaagctagagtaagtagttcgccagttaatagtttgcgcaacgttgttgccattgctacaggcatcgtggtgtcacgctcgtcgtttggtatggcttcattcagctccggttcccaacgatcaaggcgagttacatgatcccccatgttgtgcaaaaaagcggttagctccttcggtcctccgatcgttgtcagaagtaagttggccgcagtgttatcactcatggttatggcagcactgcataattctcttactgtcatgccatccgtaagatgcttttctgtgactggtgagtactcaaccaagtcattctgagaatagtgtatgcggcgaccgagttgctcttgcccggcgtcaatacgggataataccgcgccacatagcagaactttaaaagtgctcatcattggaaaacgttcttcggggcgaaaactctcaaggatcttaccgctgttgagatccagttcgatgtaacccactcgtgcacccaactgatcttcagcatcttttactttcaccagcgtttctgggtgagcaaaaacaggaaggcaaaatgccgcaaaaaagggaataagggcgacacggaaatgttgaatactcatactcttcctttttcattattattgaagcatttatcagggttattgtctcatgagcggatacatatttgaatgtatttagaaaaataaacaaataggggttccgcgcacatttccccgaaaagtgccacctgacgtc

SEQ ID NO: 19 - DNA, 4792 bp, synthetic construct
  source 1..4792: mol_type = other DNA
ttgcccggcgtcaatacgggataataccgcgccacatagcagaactttaaaagtgctcatcattggaaaacgttcttcggggcgaaaactctcaaggatcttaccgctgttgagatccagttcgatgtaacccactcgtgcacccaactgatcttcagcatcttttactttcaccagcgtttctgggtgagcaaaaacaggaaggcaaaatgccgcaaaaaagggaataagggcgacacggaaatgttgaatactcatactcttcctttttcattattattgaagcatttatcagggttattgtctcatgagcggatacatatttgaatgtatttagaaaaataaacaaataggggttccgcgcacatttccccgaaaagtgccacctgacgtcgacggatcgggagatctcccgatcccctatggtcgactctcagtacaatctgctctgatgccgcatagttaagccagtatctgctccctgcttgtgtgttggaggtcgctgagtagtgcgcgagcaaaatttaagctacaacaaggcaaggcttgaccgacaattgcatgaagaatctgcttagggttaggcgttttgcgctgcttcgcgatgtacgggccagatatacgcgagggcctatttcccatgattccttcatatttgcatatacgatacaaggctgttagagagataattagaattaatttgactgtaaacacaaagatattagtacaaaatacgtgacgtagaaagtaataatttcttgggtagtttgcagttttaaaattatgttttaaaatggactatcatatgcttaccgtaacttgaaagtatttcgatttcttggctttatatatcttgtggaaaggacgaaacaccgtaatacgactcactatagggtctagaattcctgtgaactgccgagtaggtagctgataaccagtcttcgatggtcgaagacgagtgaactgccgagtaggtagctgataacgttgcagcggccgctttttttcttctgaggcggaaagaaccagctggggctctagggggtatccccacgcgccctgtagcggcgcattaagcgcggcgggtgtggtggttacgcgcagcgtgaccgctacacttgccagcgccctagcgcccgctcctttcgctttcttcccttcctttctcgccacgttcgccggctttccccgtcaagctctaaatcgggggctccctttagggttccgatttagtgctttacggcacctcgaccccaaaaaacttgattagggtgatggttcacgtagtgggccatcgccctgatagacggtttttcgccctttgacgttggagtccacgttctttaatagtggactcttgttccaaactggaacaacactcaaccctatctcggtctattcttttgatttataagggattttgccgatttcggcctattggttaaaaaatgagctgatttaacaaaaatttaacgcgaattaattctgtggaatgtgtgtcagttagggtgtggaaagtccccaggctccccagcaggcagaagtatgcaaagcatgcatctcaattagtcagcaaccaggtgtggaaagtccccaggctccccagcaggcagaagtatgcaaagcatgcatctcaattagtcagcaaccatagtcccgcccctaactccgcccatcccgcccctaactccgcccagttccgcccattctccgccccatggctgactaattttttttatttatgcagaggccgaggccgcctctgcctctgagctattccagaagtagtgaggaggcttttttggaggcctaggcttttgcaaaaagctcccgggagcttgtatatccattttcggatctgatcaagagacaggatgaggatcgtttcgcatgattgaacaagatggattgcacgcaggttctccggccgcttgggtggagaggctattcggctatgactgggcacaacagacaatcggctgctctgatgccgccgtgttccggctgtcagcgcaggggcgcccggttctttttgtcaagaccgacctgtccggtgccctgaatgaactgcaggacgaggcagcgcggctatcgtggctggccacgacgggcgttccttgcgcagctgtgctcgacgttgtcactgaagcgggaagggactggctgctattgggcgaagtgccggggcaggatctcctgtcatctcaccttgctcctgccgagaaagtatccatcatggctgatgcaatgcggcggctgcatacgcttgatccggctacctgcccattcgaccaccaagcgaaacatcgcatcgagcgagcacgtactcggatggaagccggtcttgtcgatcaggatgatctggacgaagagcatcaggggctcgcgccagccgaactgttcgccaggctcaaggcgcgcatgcccgacggcgaggatctcgtcgtgacccatggcgatgcctgcttgccgaatatcatggtggaaaatggccgcttttctggattcatcgactgtggccggctgggtgtggcggaccgctatcaggacatagcgttggctacccgtgatattgctgaagagcttggcggcgaatgggctgaccgcttcctcgtgctttacggtatcgccgctcccgattcgcagcgcatcgccttctatcgccttcttgacgagttcttctgagcgggactctggggttcgaaatgaccgaccaagcgacgcccaacctgccatcacgagatttcgattccaccgccgccttctatgaaaggttgggcttcggaatcgttttccgggacgccggctggatgatcctccagcgcggggatctcatgctggagttcttcgcccaccccaacttgtttattgcagcttataatggttacaaataaagcaatagcatcacaaatttcacaaataaagcatttttttcactgcattctagttgtggtttgtccaaactcatcaatgtatcttatcatgtctgtataccgtcgacctctagctagagcttggcgtaatcatggtcatagctgtttcctgtgtgaaattgttatccgctcacaattccacacaacatacgagccggaagcataaagtgtaaagcctggggtgcctaatgagtgagctaactcacattaattgcgttgcgctcactgcccgctttccagtcgggaaacctgtcgtgccagctgcattaatgaatcggccaacgcgcggggagaggcggtttgcgtattgggcgctcttccgcttcctcgctcactgactcgctgcgctcggtcgttcggctgcggcgagcggtatcagctcactcaaaggcggtaatacggttatccacagaatcaggggataacgcaggaaagaacatgtgagcaaaaggccagcaaaaggccaggaaccgtaaaaaggccgcgttgctggcgtttttccataggctccgcccccctgacgagcatcacaaaaatcgacgctcaagtcagaggtggcgaaacccgacaggactataaagataccaggcgtttccccctggaagctccctcgtgcgctctcctgttccgaccctgccgcttaccggatacctgtccgcctttctcccttcgggaagcgtggcgctttctcaatgctcacgctgtaggtatctcagttcggtgtaggtcgttcgctccaagctgggctgtgtgcacgaaccccccgttcagcccgaccgctgcgccttatccggtaactatcgtcttgagtccaacccggtaagacacgacttatcgccactggcagcagccactggtaacaggattagcagagcgaggtatgtaggcggtgctacagagttcttgaagtggtggcctaactacggctacactagaaggacagtatttggtatctgcgctctgctgaagccagttaccttcggaaaaagagttggtagctcttgatccggcaaacaaaccaccgctggtagcggtggtttttttgtttgcaagcagcagattacgcgcagaaaaaaaggatctcaagaagatcctttgatcttttctacggggtctgacgctcagtggaacgaaaactcacgttaagggattttggtcatgagattatcaaaaaggatcttcacctagatccttttaaattaaaaatgaagttttaaatcaatctaaagtatatatgagtaaacttggtctgacagttaccaatgcttaatcagtgaggcacctatctcagcgatctgtctatttcgttcatccatagttgcctgactccccgtcgtgtagataactacgatacgggagggcttaccatctggccccagtgctgcaatgataccgcgagacccacgctcaccggctccagatttatcagcaataaaccagccagccggaagggccgagcgcagaagtggtcctgcaactttatccgcctccatccagtctattaattgttgccgggaagctagagtaagtagttcgccagttaatagtttgcgcaacgttgttgccattgctacaggcatcgtggtgtcacgctcgtcgtttggtatggcttcattcagctccggttcccaacgatcaaggcgagttacatgatcccccatgttgtgcaaaaaagcggttagctccttcggtcctccgatcgttgtcagaagtaagttggccgcagtgttatcactcatggttatggcagcactgcataattctcttactgtcatgccatccgtaagatgcttttctgtgactggtgagtactcaaccaagtcattctgagaatagtgtatgcggcgaccgagttgctc

SEQ ID NO: 20 - DNA, 6655 bp, synthetic construct
  source 1..6655: mol_type = other DNA
gacggatcgggagatctcccgatcccctatggtcgactctcagtacaatctgctctgatgccgcatagttaagccagtatctgctccctgcttgtgtgttggaggtcgctgagtagtgcgcgagcaaaatttaagctacaacaaggcaaggcttgaccgacaattgcatgaagaatctgcttagggttaggcgttttgcgctgcttcgcgatgtacgggccagatatacgcgttgacattgattattgactagttattaatagtaatcaattacggggtcattagttcatagcccatatatggagttccgcgttacataacttacggtaaatggcccgcctggctgaccgcccaacgacccccgcccattgacgtcaataatgacgtatgttcccatagtaacgccaatagggactttccattgacgtcaatgggtggactatttacggtaaactgcccacttggcagtacatcaagtgtatcatatgccaagtacgccccctattgacgtcaatgacggtaaatggcccgcctggcattatgcccagtacatgaccttatgggactttcctacttggcagtacatctacgtattagtcatcgctattaccatggtgatgcggttttggcagtacatcaatgggcgtggatagcggtttgactcacggggatttccaagtctccaccccattgacgtcaatgggagtttgttttggcaccaaaatcaacgggactttccaaaatgtcgtaacaactccgccccattgacgcaaatgggcggtaggcgtgtacggtgggaggtctatataagcagagctctctggctaactagagaacccactgcttactggcttatcgaaattaatacgactcactatagggagacccaagcttggtaccgagctcggatccgccaccatgggcaaacggacagccgacggaagcgagttcgagtcaccgaaaaagaagcgaaaagttggctccggaatgttcctccagaggccaaagccctacagcgacgagtccctggagtctttctttatcagagtggccaataagaacggctatggcgatgtgcacaggttcctggaggccaccaagcggttcctccaggacatcgatcacaacggctaccagacctttccaacagacatcaccaggatcaatccctatagcgccaagaacagctcctctgcccgcacagcctccttcctgaagctggcccagctgacctttaatgagccacctgagctgctgggactggccatcaatcggacaaacatgaagtactccccttctaccagcgccgtggtgagaggagcagaggtgttcccacggtccctgctgagaacccacagcatcccatgctgtcccctgtgcctgagagagaacggctacgccagctatctgtggcacttccagggctacgagtattgtcactcccacaatgtgcctctgatcaccacatgctcttgtggcaaggagtttgactacagggtgagcggcctgaagggcatctgctgtaagtgcaaggagccaatcaccctgacaagccgcgagaatggccacgaggccgcctgtaccgtgtccaactggctggccggccacgagtctaagcctctgccaaacctgcccaagtcctatagatggggactggtgcactggtggatgggcatcaaggactccgagttcgatcacttctcttttgtgcagttctttagcaactggcctcggagcttccactccatcatcgaggacgaggtggagtttaatctggagcacgccgtggtgtccacctctgagctgcggctgaaggatctgctgggcagactgttctttggcagcatcaggctgccagagcgcaatctccagcacaacatcatcctgggcgagctgctgtgctacctggagaaccgcctgtggcaggacaagggcctgatcgccaatctgaagatgaacgccctggaggccacagtgatgctgaattgttccctggatcagatcgcctctatggtggagcagcgcatcctgaagcccaatagaaagtccaagcctaactctccactggacgtgaccgattacctgttccactttggcgacatcttctgcctgtggctggccgagtttcagtccgatgagttcaaccggagcttctacgtgagccggtggtaattacattggaagtggataatctagagggccctattctatagtgtcacctaaatgctagagctcgctgatcagcctcgactgtgccttctagttgccagccatctgttgtttgcccctcccccgtgccttccttgaccctggaaggtgccactcccactgtcctttcctaataaaatgaggaaattgcatcgcattgtctgagtaggtgtcattctattctggggggtggggtggggcaggacagcaagggggaggattgggaagacaatagcaggcatgctggggatgcggtgggctctatggcttctgaggcggaaagaaccagctggggctctagggggtatccccacgcgccctgtagcggcgcattaagcgcggcgggtgtggtggttacgcgcagcgtgaccgctacacttgccagcgccctagcgcccgctcctttcgctttcttcccttcctttctcgccacgttcgccggctttccccgtcaagctctaaatcggggcatccctttagggttccgatttagtgctttacggcacctcgaccccaaaaaacttgattagggtgatggttcacgtagtgggccatcgccctgatagacggtttttcgccctttgacgttggagtccacgttctttaatagtggactcttgttccaaactggaacaacactcaaccctatctcggtctattcttttgatttataagggattttggggatttcggcctattggttaaaaaatgagctgatttaacaaaaatttaacgcgaattaattctgtggaatgtgtgtcagttagggtgtggaaagtccccaggctccccaggcaggcagaagtatgcaaagcatgcatctcaattagtcagcaaccaggtgtggaaagtccccaggctccccagcaggcagaagtatgcaaagcatgcatctcaattagtcagcaaccatagtcccgcccctaactccgcccatcccgcccctaactccgcccagttccgcccattctccgccccatggctgactaattttttttatttatgcagaggccgaggccgcctctgcctctgagctattccagaagtagtgaggaggcttttttggaggcctaggcttttgcaaaaagctcccgggagcttgtatatccattttcggatctgatcaagagacaggatgaggatcgtttcgcatgattgaacaagatggattgcacgcaggttctccggccgcttgggtggagaggctattcggctatgactgggcacaacagacaatcggctgctctgatgccgccgtgttccggctgtcagcgcaggggcgcccggttctttttgtcaagaccgacctgtccggtgccctgaatgaactgcaggacgaggcagcgcggctatcgtggctggccacgacgggcgttccttgcgcagctgtgctcgacgttgtcactgaagcgggaagggactggctgctattgggcgaagtgccggggcaggatctcctgtcatctcaccttgctcctgccgagaaagtatccatcatggctgatgcaatgcggcggctgcatacgcttgatccggctacctgcccattcgaccaccaagcgaaacatcgcatcgagcgagcacgtactcggatggaagccggtcttgtcgatcaggatgatctggacgaagagcatcaggggctcgcgccagccgaactgttcgccaggctcaaggcgcgcatgcccgacggcgaggatctcgtcgtgacccatggcgatgcctgcttgccgaatatcatggtggaaaatggccgcttttctggattcatcgactgtggccggctgggtgtggcggaccgctatcaggacatagcgttggctacccgtgatattgctgaagagcttggcggcgaatgggctgaccgcttcctcgtgctttacggtatcgccgctcccgattcgcagcgcatcgccttctatcgccttcttgacgagttcttctgagcgggactctggggttcgaaatgaccgaccaagcgacgcccaacctgccatcacgagatttcgattccaccgccgccttctatgaaaggttgggcttcggaatcgttttccgggacgccggctggatgatcctccagcgcggggatctcatgctggagttcttcgcccaccccaacttgtttattgcagcttataatggttacaaataaagcaatagcatcacaaatttcacaaataaagcatttttttcactgcattctagttgtggtttgtccaaactcatcaatgtatcttatcatgtctgtataccgtcgacctctagctagagcttggcgtaatcatggtcatagctgtttcctgtgtgaaattgttatccgctcacaattccacacaacatacgagccggaagcataaagtgtaaagcctggggtgcctaatgagtgagctaactcacattaattgcgttgcgctcactgcccgctttccagtcgggaaacctgtcgtgccagctgcattaatgaatcggccaacgcgcggggagaggcggtttgcgtattgggcgctcttccgcttcctcgctcactgactcgctgcgctcggtcgttcggctgcggcgagcggtatcagctcactcaaaggcggtaatacggttatccacagaatcaggggataacgcaggaaagaacatgtgagcaaaaggccagcaaaaggccaggaaccgtaaaaaggccgcgttgctggcgtttttccataggctccgcccccctgacgagcatcacaaaaatcgacgctcaagtcagaggtggcgaaacccgacaggactataaagataccaggcgtttccccctggaagctccctcgtgcgctctcctgttccgaccctgccgcttaccggatacctgtccgcctttctcccttcgggaagcgtggcgctttctcaatgctcacgctgtaggtatctcagttcggtgtaggtcgttcgctccaagctgggctgtgtgcacgaaccccccgttcagcccgaccgctgcgccttatccggtaactatcgtcttgagtccaacccggtaagacacgacttatcgccactggcagcagccactggtaacaggattagcagagcgaggtatgtaggcggtgctacagagttcttgaagtggtggcctaactacggctacactagaaggacagtatttggtatctgcgctctgctgaagccagttaccttcggaaaaagagttggtagctcttgatccggcaaacaaaccaccgctggtagcggtggtttttttgtttgcaagcagcagattacgcgcagaaaaaaaggatctcaagaagatcctttgatcttttctacggggtctgacgctcagtggaacgaaaactcacgttaagggattttggtcatgagattatcaaaaaggatcttcacctagatccttttaaattaaaaatgaagttttaaatcaatctaaagtatatatgagtaaacttggtctgacagttaccaatgcttaatcagtgaggcacctatctcagcgatctgtctatttcgttcatccatagttgcctgactccccgtcgtgtagataactacgatacgggagggcttaccatctggccccagtgctgcaatgataccgcgagacccacgctcaccggctccagatttatcagcaataaaccagccagccggaagggccgagcgcagaagtggtcctgcaactttatccgcctccatccagtctattaattgttgccgggaagctagagtaagtagttcgccagttaatagtttgcgcaacgttgttgccattgctacaggcatcgtggtgtcacgctcgtcgtttggtatggcttcattcagctccggttcccaacgatcaaggcgagttacatgatcccccatgttgtgcaaaaaagcggttagctccttcggtcctccgatcgttgtcagaagtaagttggccgcagtgttatcactcatggttatggcagcactgcataattctcttactgtcatgccatccgtaagatgcttttctgtgactggtgagtactcaaccaagtcattctgagaatagtgtatgcggcgaccgagttgctcttgcccggcgtcaatacgggataataccgcgccacatagcagaactttaaaagtgctcatcattggaaaacgttcttcggggcgaaaactctcaaggatcttaccgctgttgagatccagttcgatgtaacccactcgtgcacccaactgatcttcagcatcttttactttcaccagcgtttctgggtgagcaaaaacaggaaggcaaaatgccgcaaaaaagggaataagggcgacacggaaatgttgaatactcatactcttcctttttcattattattgaagcatttatcagggttattgtctcatgagcggatacatatttgaatgtatttagaaaaataaacaaataggggttccgcgcacatttccccgaaaagtgccacctgacgtc

SEQ ID NO: 21 - DNA, 7393 bp, synthetic construct
  source 1..7393: mol_type = other DNA
gacggatcgggagatctcccgatcccctatggtcgactctcagtacaatctgctctgatgccgcatagttaagccagtatctgctccctgcttgtgtgttggaggtcgctgagtagtgcgcgagcaaaatttaagctacaacaaggcaaggcttgaccgacaattgcatgaagaatctgcttagggttaggcgttttgcgctgcttcgcgatgtacgggccagatatacgcgttgacattgattattgactagttattaatagtaatcaattacggggtcattagttcatagcccatatatggagttccgcgttacataacttacggtaaatggcccgcctggctgaccgcccaacgacccccgcccattgacgtcaataatgacgtatgttcccatagtaacgccaatagggactttccattgacgtcaatgggtggactatttacggtaaactgcccacttggcagtacatcaagtgtatcatatgccaagtacgccccctattgacgtcaatgacggtaaatggcccgcctggcattatgcccagtacatgaccttatgggactttcctacttggcagtacatctacgtattagtcatcgctattaccatggtgatgcggttttggcagtacatcaatgggcgtggatagcggtttgactcacggggatttccaagtctccaccccattgacgtcaatgggagtttgttttggcaccaaaatcaacgggactttccaaaatgtcgtaacaactccgccccattgacgcaaatgggcggtaggcgtgtacggtgggaggtctatataagcagagctctctggctaactagagaacccactgcttactggcttatcgaaattaatacgactcactatagggagacccaagcttggtaccgagctcggatccgccaccatgggcaaacggacagccgacggaagcgagttcgagtcaccgaaaaagaagcgaaaagttggctccggaatgcagaccctgaaggagctgatcgccagcaaccccgacgatctgaccacagagctgaagagggccttccgccccctgacacctcacatcgccatcgacggcaatgagctggatgccctgaccatcctggtgaacctgacagacaagaccgacgatcagaaggacctgctggatcgggccaagtgtaagcagaagctgagagatgagaagtggtgggcctcctgcatcaactgcgtgaactacaggcagtctcacaacccaaagttccccgacatccgcagcgagggcgtgatcagaacacaggccctgggcgagctgcccagctttctgctgtctagctccaagatcccaccctaccactggtcttatagccacgactctaagtatgtgaataagagcgccttcctgaccaacgagttttgctgggatggcgagatcagctgtctgggcgagctgctgaaggacgccgatcaccctctgtggaacacactgaagaagctgggctgctcccagaaaacctgtaaggcaatggccaagcagctggccgacatcacactgaccacaatcaatgtgaccctggcccccaactacctgacacagatctctctgcctgactccgatacatcttatatctccctgtctcctgtggccagcctgtccatgcagagccacttccaccagaggctccaggatgagaacaggcactccgccatcacccggttcagccggaccacaaatatgggagtgacagcaatgacctgcggaggagccttcaggatgctgaaaagcggcgccaagttttctagccctccacaccaccggctgaacagcaagagatcctggctgacctccgagcatgtgcagtctctgaagcagtaccagcggctgaataagagcctgatcccagagaactccagaatcgccctgcggagaaagtataagatcgagctgcaaaatatggtgcgctcttggttcgccatgcaggaccacacactggatagcaatatcctgatccagcacctgaaccacgacctgtcctacctgggcgccaccaagcggttcgcctatgatcccgccatgacaaagctgtttaccgagctgctgaagagagagctgtctaacagcatcaacaatggcgagcagcacaccaatggcagctttctggtgctgcctaacatcagagtgtgcggagcaaccgccctgtcctctcctgtgacagtgggcatcccatccctgaccgccttctttggcttcgtgcacgcctttgagaggaatatcaaccgcaccacaagctccttcagggtggagagctttgccatctgcgtgcaccagctgcatgtggagaagcgcggcctgacagccgagttcgtggagaagggcgacggaacaatctccgccccagcaaccagggacgattggcagtgtgatgtggtgttctctctgatcctgaataccaactttgcccagcacatcgaccaggatacactcgtcacctctctgccaaagaggctggcaaggggaagcgccaagatcgccatcgacgatttcaagcacatcaactccttttctacactggaaaccgcaatcgagagcctgccaatcgaggcaggcagatggctgagtctgtacgcccagtccaacaataacctgtctgacctgctggccgccatgacagaggatcaccagctgatggccagctgcgtgggctaccacctgctggaggagcctaaagacaagccaaactccctcagaggctataagcacgccatcgccgagtgtatcatcggcctgatcaattccatcaccttctctagcgagacagatcccaacaccatcttttggagcctgaagaattaccagaactatctggtggtgcagcctcgctccatcaatgacgaaaccaccgataagtcctctctgtaattacattggaagtggataatctagagggccctattctatagtgtcacctaaatgctagagctcgctgatcagcctcgactgtgccttctagttgccagccatctgttgtttgcccctcccccgtgccttccttgaccctggaaggtgccactcccactgtcctttcctaataaaatgaggaaattgcatcgcattgtctgagtaggtgtcattctattctggggggtggggtggggcaggacagcaagggggaggattgggaagacaatagcaggcatgctggggatgcggtgggctctatggcttctgaggcggaaagaaccagctggggctctagggggtatccccacgcgccctgtagcggcgcattaagcgcggcgggtgtggtggttacgcgcagcgtgaccgctacacttgccagcgccctagcgcccgctcctttcgctttcttcccttcctttctcgccacgttcgccggctttccccgtcaagctctaaatcggggcatccctttagggttccgatttagtgctttacggcacctcgaccccaaaaaacttgattagggtgatggttcacgtagtgggccatcgccctgatagacggtttttcgccctttgacgttggagtccacgttctttaatagtggactcttgttccaaactggaacaacactcaaccctatctcggtctattcttttgatttataagggattttggggatttcggcctattggttaaaaaatgagctgatttaacaaaaatttaacgcgaattaattctgtggaatgtgtgtcagttagggtgtggaaagtccccaggctccccaggcaggcagaagtatgcaaagcatgcatctcaattagtcagcaaccaggtgtggaaagtccccaggctccccagcaggcagaagtatgcaaagcatgcatctcaattagtcagcaaccatagtcccgcccctaactccgcccatcccgcccctaactccgcccagttccgcccattctccgccccatggctgactaattttttttatttatgcagaggccgaggccgcctctgcctctgagctattccagaagtagtgaggaggcttttttggaggcctaggcttttgcaaaaagctcccgggagcttgtatatccattttcggatctgatcaagagacaggatgaggatcgtttcgcatgattgaacaagatggattgcacgcaggttctccggccgcttgggtggagaggctattcggctatgactgggcacaacagacaatcggctgctctgatgccgccgtgttccggctgtcagcgcaggggcgcccggttctttttgtcaagaccgacctgtccggtgccctgaatgaactgcaggacgaggcagcgcggctatcgtggctggccacgacgggcgttccttgcgcagctgtgctcgacgttgtcactgaagcgggaagggactggctgctattgggcgaagtgccggggcaggatctcctgtcatctcaccttgctcctgccgagaaagtatccatcatggctgatgcaatgcggcggctgcatacgcttgatccggctacctgcccattcgaccaccaagcgaaacatcgcatcgagcgagcacgtactcggatggaagccggtcttgtcgatcaggatgatctggacgaagagcatcaggggctcgcgccagccgaactgttcgccaggctcaaggcgcgcatgcccgacggcgaggatctcgtcgtgacccatggcgatgcctgcttgccgaatatcatggtggaaaatggccgcttttctggattcatcgactgtggccggctgggtgtggcggaccgctatcaggacatagcgttggctacccgtgatattgctgaagagcttggcggcgaatgggctgaccgcttcctcgtgctttacggtatcgccgctcccgattcgcagcgcatcgccttctatcgccttcttgacgagttcttctgagcgggactctggggttcgaaatgaccgaccaagcgacgcccaacctgccatcacgagatttcgattccaccgccgccttctatgaaaggttgggcttcggaatcgttttccgggacgccggctggatgatcctccagcgcggggatctcatgctggagttcttcgcccaccccaacttgtttattgcagcttataatggttacaaataaagcaatagcatcacaaatttcacaaataaagcatttttttcactgcattctagttgtggtttgtccaaactcatcaatgtatcttatcatgtctgtataccgtcgacctctagctagagcttggcgtaatcatggtcatagctgtttcctgtgtgaaattgttatccgctcacaattccacacaacatacgagccggaagcataaagtgtaaagcctggggtgcctaatgagtgagctaactcacattaattgcgttgcgctcactgcccgctttccagtcgggaaacctgtcgtgccagctgcattaatgaatcggccaacgcgcggggagaggcggtttgcgtattgggcgctcttccgcttcctcgctcactgactcgctgcgctcggtcgttcggctgcggcgagcggtatcagctcactcaaaggcggtaatacggttatccacagaatcaggggataacgcaggaaagaacatgtgagcaaaaggccagcaaaaggccaggaaccgtaaaaaggccgcgttgctggcgtttttccataggctccgcccccctgacgagcatcacaaaaatcgacgctcaagtcagaggtggcgaaacccgacaggactataaagataccaggcgtttccccctggaagctccctcgtgcgctctcctgttccgaccctgccgcttaccggatacctgtccgcctttctcccttcgggaagcgtggcgctttctcaatgctcacgctgtaggtatctcagttcggtgtaggtcgttcgctccaagctgggctgtgtgcacgaaccccccgttcagcccgaccgctgcgccttatccggtaactatcgtcttgagtccaacccggtaagacacgacttatcgccactggcagcagccactggtaacaggattagcagagcgaggtatgtaggcggtgctacagagttcttgaagtggtggcctaactacggctacactagaaggacagtatttggtatctgcgctctgctgaagccagttaccttcggaaaaagagttggtagctcttgatccggcaaacaaaccaccgctggtagcggtggtttttttgtttgcaagcagcagattacgcgcagaaaaaaaggatctcaagaagatcctttgatcttttctacggggtctgacgctcagtggaacgaaaactcacgttaagggattttggtcatgagattatcaaaaaggatcttcacctagatccttttaaattaaaaatgaagttttaaatcaatctaaagtatatatgagtaaacttggtctgacagttaccaatgcttaatcagtgaggcacctatctcagcgatctgtctatttcgttcatccatagttgcctgactccccgtcgtgtagataactacgatacgggagggcttaccatctggccccagtgctgcaatgataccgcgagacccacgctcaccggctccagatttatcagcaataaaccagccagccggaagggccgagcgcagaagtggtcctgcaactttatccgcctccatccagtctattaattgttgccgggaagctagagtaagtagttcgccagttaatagtttgcgcaacgttgttgccattgctacaggcatcgtggtgtcacgctcgtcgtttggtatggcttcattcagctccggttcccaacgatcaaggcgagttacatgatcccccatgttgtgcaaaaaagcggttagctccttcggtcctccgatcgttgtcagaagtaagttggccgcagtgttatcactcatggttatggcagcactgcataattctcttactgtcatgccatccgtaagatgcttttctgtgactggtgagtactcaaccaagtcattctgagaatagtgtatgcggcgaccgagttgctcttgcccggcgtcaatacgggataataccgcgccacatagcagaactttaaaagtgctcatcattggaaaacgttcttcggggcgaaaactctcaaggatcttaccgctgttgagatccagttcgatgtaacccactcgtgcacccaactgatcttcagcatcttttactttcaccagcgtttctgggtgagcaaaaacaggaaggcaaaatgccgcaaaaaagggaataagggcgacacggaaatgttgaatactcatactcttcctttttcattattattgaagcatttatcagggttattgtctcatgagcggatacatatttgaatgtatttagaaaaataaacaaataggggttccgcgcacatttccccgaaaagtgccacctgacgtc

SEQ ID NO: 22 - DNA, 6529 bp, synthetic construct
  source 1..6529: mol_type = other DNA
gacggatcgggagatctcccgatcccctatggtcgactctcagtacaatctgctctgatgccgcatagttaagccagtatctgctccctgcttgtgtgttggaggtcgctgagtagtgcgcgagcaaaatttaagctacaacaaggcaaggcttgaccgacaattgcatgaagaatctgcttagggttaggcgttttgcgctgcttcgcgatgtacgggccagatatacgcgttgacattgattattgactagttattaatagtaatcaattacggggtcattagttcatagcccatatatggagttccgcgttacataacttacggtaaatggcccgcctggctgaccgcccaacgacccccgcccattgacgtcaataatgacgtatgttcccatagtaacgccaatagggactttccattgacgtcaatgggtggactatttacggtaaactgcccacttggcagtacatcaagtgtatcatatgccaagtacgccccctattgacgtcaatgacggtaaatggcccgcctggcattatgcccagtacatgaccttatgggactttcctacttggcagtacatctacgtattagtcatcgctattaccatggtgatgcggttttggcagtacatcaatgggcgtggatagcggtttgactcacggggatttccaagtctccaccccattgacgtcaatgggagtttgttttggcaccaaaatcaacgggactttccaaaatgtcgtaacaactccgccccattgacgcaaatgggcggtaggcgtgtacggtgggaggtctatataagcagagctctctggctaactagagaacccactgcttactggcttatcgaaattaatacgactcactatagggagacccaagcttggtaccgagctcggatccgccaccatgggcaaacggacagccgacggaagcgagttcgagtcaccgaaaaagaagcgaaaagttggctccggaatgaagctgccaaccaacctggcctacgagcggagcatcgaccccagcgacgtgtgcttcttcgtggtgtggccagacgataggaaaacccccctgacatacaattcccgcacactgctgggacagatggaggcagccagcctggcatacgacgtgtccggccagcctatcaagtctgccaccgcagaggccctggcacagggcaaccctcaccaggtggatttctgccatgtgccatacggcgccagccacatcgagtgtagcttctccgtgtcttttagctccgagctgcggcagccatataagtgtaattctagcaaggtgaagcagacactggtgcagctggtggagctgtacgaaaccaagatcggctggacagagctggccacccggtatctgatgaatatctgcaacggcaagtggctgtggaagaatacaagaaaggcctactgttggaacatcgtgctgaccccctggccttggaatggcgagaaagtgggcttcgaggacatcaggaccaactatacatcccgccaggacttcaagaacaataagaattggtctgccatcgtggagatgatcaagacagccttctcctctaccgacggcctggccatctttgaggtgagggccacactgcacctgccaaccaacgcaatggtgcgccctagccaggtgttcacagagaaggagagcggctccaagtctaagagcaagacccagaactctagggtgttccagagcaccacaatcgatggagagcggagcccaatcctgggagcctttaagacaggcgccgccatcgccaccatcgacgattggtatccagaggcaaccgagcctctgagggtgggccgctttggagtgcacagggaggacgtgacatgctacagacacccatctaccggcaaggatttctttagcatcctccagcaggccgagcactatatcgaggtgctgagtgccaacaagacacccgcccaggaaaccatcaatgacatgcacttcctgatggccaacctgatcaagggcggcatgtttcagcacaagggcgactaattacattggaagtggataatctagagggccctattctatagtgtcacctaaatgctagagctcgctgatcagcctcgactgtgccttctagttgccagccatctgttgtttgcccctcccccgtgccttccttgaccctggaaggtgccactcccactgtcctttcctaataaaatgaggaaattgcatcgcattgtctgagtaggtgtcattctattctggggggtggggtggggcaggacagcaagggggaggattgggaagacaatagcaggcatgctggggatgcggtgggctctatggcttctgaggcggaaagaaccagctggggctctagggggtatccccacgcgccctgtagcggcgcattaagcgcggcgggtgtggtggttacgcgcagcgtgaccgctacacttgccagcgccctagcgcccgctcctttcgctttcttcccttcctttctcgccacgttcgccggctttccccgtcaagctctaaatcggggcatccctttagggttccgatttagtgctttacggcacctcgaccccaaaaaacttgattagggtgatggttcacgtagtgggccatcgccctgatagacggtttttcgccctttgacgttggagtccacgttctttaatagtggactcttgttccaaactggaacaacactcaaccctatctcggtctattcttttgatttataagggattttggggatttcggcctattggttaaaaaatgagctgatttaacaaaaatttaacgcgaattaattctgtggaatgtgtgtcagttagggtgtggaaagtccccaggctccccaggcaggcagaagtatgcaaagcatgcatctcaattagtcagcaaccaggtgtggaaagtccccaggctccccagcaggcagaagtatgcaaagcatgcatctcaattagtcagcaaccatagtcccgcccctaactccgcccatcccgcccctaactccgcccagttccgcccattctccgccccatggctgactaattttttttatttatgcagaggccgaggccgcctctgcctctgagctattccagaagtagtgaggaggcttttttggaggcctaggcttttgcaaaaagctcccgggagcttgtatatccattttcggatctgatcaagagacaggatgaggatcgtttcgcatgattgaacaagatggattgcacgcaggttctccggccgcttgggtggagaggctattcggctatgactgggcacaacagacaatcggctgctctgatgccgccgtgttccggctgtcagcgcaggggcgcccggttctttttgtcaagaccgacctgtccggtgccctgaatgaactgcaggacgaggcagcgcggctatcgtggctggccacgacgggcgttccttgcgcagctgtgctcgacgttgtcactgaagcgggaagggactggctgctattgggcgaagtgccggggcaggatctcctgtcatctcaccttgctcctgccgagaaagtatccatcatggctgatgcaatgcggcggctgcatacgcttgatccggctacctgcccattcgaccaccaagcgaaacatcgcatcgagcgagcacgtactcggatggaagccggtcttgtcgatcaggatgatctggacgaagagcatcaggggctcgcgccagccgaactgttcgccaggctcaaggcgcgcatgcccgacggcgaggatctcgtcgtgacccatggcgatgcctgcttgccgaatatcatggtggaaaatggccgcttttctggattcatcgactgtggccggctgggtgtggcggaccgctatcaggacatagcgttggctacccgtgatattgctgaagagcttggcggcgaatgggctgaccgcttcctcgtgctttacggtatcgccgctcccgattcgcagcgcatcgccttctatcgccttcttgacgagttcttctgagcgggactctggggttcgaaatgaccgaccaagcgacgcccaacctgccatcacgagatttcgattccaccgccgccttctatgaaaggttgggcttcggaatcgttttccgggacgccggctggatgatcctccagcgcggggatctcatgctggagttcttcgcccaccccaacttgtttattgcagcttataatggttacaaataaagcaatagcatcacaaatttcacaaataaagcatttttttcactgcattctagttgtggtttgtccaaactcatcaatgtatcttatcatgtctgtataccgtcgacctctagctagagcttggcgtaatcatggtcatagctgtttcctgtgtgaaattgttatccgctcacaattccacacaacatacgagccggaagcataaagtgtaaagcctggggtgcctaatgagtgagctaactcacattaattgcgttgcgctcactgcccgctttccagtcgggaaacctgtcgtgccagctgcattaatgaatcggccaacgcgcggggagaggcggtttgcgtattgggcgctcttccgcttcctcgctcactgactcgctgcgctcggtcgttcggctgcggcgagcggtatcagctcactcaaaggcggtaatacggttatccacagaatcaggggataacgcaggaaagaacatgtgagcaaaaggccagcaaaaggccaggaaccgtaaaaaggccgcgttgctggcgtttttccataggctccgcccccctgacgagcatcacaaaaatcgacgctcaagtcagaggtggcgaaacccgacaggactataaagataccaggcgtttccccctggaagctccctcgtgcgctctcctgttccgaccctgccgcttaccggatacctgtccgcctttctcccttcgggaagcgtggcgctttctcaatgctcacgctgtaggtatctcagttcggtgtaggtcgttcgctccaagctgggctgtgtgcacgaaccccccgttcagcccgaccgctgcgccttatccggtaactatcgtcttgagtccaacccggtaagacacgacttatcgccactggcagcagccactggtaacaggattagcagagcgaggtatgtaggcggtgctacagagttcttgaagtggtggcctaactacggctacactagaaggacagtatttggtatctgcgctctgctgaagccagttaccttcggaaaaagagttggtagctcttgatccggcaaacaaaccaccgctggtagcggtggtttttttgtttgcaagcagcagattacgcgcagaaaaaaaggatctcaagaagatcctttgatcttttctacggggtctgacgctcagtggaacgaaaactcacgttaagggattttggtcatgagattatcaaaaaggatcttcacctagatccttttaaattaaaaatgaagttttaaatcaatctaaagtatatatgagtaaacttggtctgacagttaccaatgcttaatcagtgaggcacctatctcagcgatctgtctatttcgttcatccatagttgcctgactccccgtcgtgtagataactacgatacgggagggcttaccatctggccccagtgctgcaatgataccgcgagacccacgctcaccggctccagatttatcagcaataaaccagccagccggaagggccgagcgcagaagtggtcctgcaactttatccgcctccatccagtctattaattgttgccgggaagctagagtaagtagttcgccagttaatagtttgcgcaacgttgttgccattgctacaggcatcgtggtgtcacgctcgtcgtttggtatggcttcattcagctccggttcccaacgatcaaggcgagttacatgatcccccatgttgtgcaaaaaagcggttagctccttcggtcctccgatcgttgtcagaagtaagttggccgcagtgttatcactcatggttatggcagcactgcataattctcttactgtcatgccatccgtaagatgcttttctgtgactggtgagtactcaaccaagtcattctgagaatagtgtatgcggcgaccgagttgctcttgcccggcgtcaatacgggataataccgcgccacatagcagaactttaaaagtgctcatcattggaaaacgttcttcggggcgaaaactctcaaggatcttaccgctgttgagatccagttcgatgtaacccactcgtgcacccaactgatcttcagcatcttttactttcaccagcgtttctgggtgagcaaaaacaggaaggcaaaatgccgcaaaaaagggaataagggcgacacggaaatgttgaatactcatactcttcctttttcattattattgaagcatttatcagggttattgtctcatgagcggatacatatttgaatgtatttagaaaaataaacaaataggggttccgcgcacatttccccgaaaagtgccacctgacgtc

SEQ ID NO: 23 - DNA, 6070 bp, synthetic construct
  source 1..6070: mol_type = other DNA
gacggatcgggagatctcccgatcccctatggtcgactctcagtacaatctgctctgatgccgcatagttaagccagtatctgctccctgcttgtgtgttggaggtcgctgagtagtgcgcgagcaaaatttaagctacaacaaggcaaggcttgaccgacaattgcatgaagaatctgcttagggttaggcgttttgcgctgcttcgcgatgtacgggccagatatacgcgttgacattgattattgactagttattaatagtaatcaattacggggtcattagttcatagcccatatatggagttccgcgttacataacttacggtaaatggcccgcctggctgaccgcccaacgacccccgcccattgacgtcaataatgacgtatgttcccatagtaacgccaatagggactttccattgacgtcaatgggtggactatttacggtaaactgcccacttggcagtacatcaagtgtatcatatgccaagtacgccccctattgacgtcaatgacggtaaatggcccgcctggcattatgcccagtacatgaccttatgggactttcctacttggcagtacatctacgtattagtcatcgctattaccatggtgatgcggttttggcagtacatcaatgggcgtggatagcggtttgactcacggggatttccaagtctccaccccattgacgtcaatgggagtttgttttggcaccaaaatcaacgggactttccaaaatgtcgtaacaactccgccccattgacgcaaatgggcggtaggcgtgtacggtgggaggtctatataagcagagctctctggctaactagagaacccactgcttactggcttatcgaaattaatacgactcactatagggagacccaagcttggtaccgagctcggatccgccaccatgggcaaacggacagccgacggaagcgagttcgagtcaccgaaaaagaagcgaaaagttggctccggagtgaagtggtactataagaccatcacattcctgcctgagctgtgcaacaatgagtctctggcagcaaagtgtctgcgggtgctgcacggcttcaattaccagtatgagacaagaaacatcggcgtgtcctttccactgtggtgcgacgccaccgtgggcaagaagatctctttcgtgagcaagaacaagatcgagctggatctgctgctgaagcagcactacttcgtgcagatggagcagctccagtattttcacatcagcaatacagtgctggtgcccgaggactgcacctacgtgagctttcggagatgtcagtccatcgataagctgaccgcagcaggactggcaagaaagatcaggcgcctggagaagcgggccctgtccagaggcgagcagttcgacccatctagctttgcccagaaggagcacacagccatcgcccactaccactctctgggcgagtcctctaagcagaccaatcggaacttcagactgaacatcaggatgctgagtgagcagccaagggagggcaattccatcttcagctcctatggcctgagcaattccgagaactcttttcagcccgtgcctctgatctaattacattggaagtggataatctagagggccctattctatagtgtcacctaaatgctagagctcgctgatcagcctcgactgtgccttctagttgccagccatctgttgtttgcccctcccccgtgccttccttgaccctggaaggtgccactcccactgtcctttcctaataaaatgaggaaattgcatcgcattgtctgagtaggtgtcattctattctggggggtggggtggggcaggacagcaagggggaggattgggaagacaatagcaggcatgctggggatgcggtgggctctatggcttctgaggcggaaagaaccagctggggctctagggggtatccccacgcgccctgtagcggcgcattaagcgcggcgggtgtggtggttacgcgcagcgtgaccgctacacttgccagcgccctagcgcccgctcctttcgctttcttcccttcctttctcgccacgttcgccggctttccccgtcaagctctaaatcggggcatccctttagggttccgatttagtgctttacggcacctcgaccccaaaaaacttgattagggtgatggttcacgtagtgggccatcgccctgatagacggtttttcgccctttgacgttggagtccacgttctttaatagtggactcttgttccaaactggaacaacactcaaccctatctcggtctattcttttgatttataagggattttggggatttcggcctattggttaaaaaatgagctgatttaacaaaaatttaacgcgaattaattctgtggaatgtgtgtcagttagggtgtggaaagtccccaggctccccaggcaggcagaagtatgcaaagcatgcatctcaattagtcagcaaccaggtgtggaaagtccccaggctccccagcaggcagaagtatgcaaagcatgcatctcaattagtcagcaaccatagtcccgcccctaactccgcccatcccgcccctaactccgcccagttccgcccattctccgccccatggctgactaattttttttatttatgcagaggccgaggccgcctctgcctctgagctattccagaagtagtgaggaggcttttttggaggcctaggcttttgcaaaaagctcccgggagcttgtatatccattttcggatctgatcaagagacaggatgaggatcgtttcgcatgattgaacaagatggattgcacgcaggttctccggccgcttgggtggagaggctattcggctatgactgggcacaacagacaatcggctgctctgatgccgccgtgttccggctgtcagcgcaggggcgcccggttctttttgtcaagaccgacctgtccggtgccctgaatgaactgcaggacgaggcagcgcggctatcgtggctggccacgacgggcgttccttgcgcagctgtgctcgacgttgtcactgaagcgggaagggactggctgctattgggcgaagtgccggggcaggatctcctgtcatctcaccttgctcctgccgagaaagtatccatcatggctgatgcaatgcggcggctgcatacgcttgatccggctacctgcccattcgaccaccaagcgaaacatcgcatcgagcgagcacgtactcggatggaagccggtcttgtcgatcaggatgatctggacgaagagcatcaggggctcgcgccagccgaactgttcgccaggctcaaggcgcgcatgcccgacggcgaggatctcgtcgtgacccatggcgatgcctgcttgccgaatatcatggtggaaaatggccgcttttctggattcatcgactgtggccggctgggtgtggcggaccgctatcaggacatagcgttggctacccgtgatattgctgaagagcttggcggcgaatgggctgaccgcttcctcgtgctttacggtatcgccgctcccgattcgcagcgcatcgccttctatcgccttcttgacgagttcttctgagcgggactctggggttcgaaatgaccgaccaagcgacgcccaacctgccatcacgagatttcgattccaccgccgccttctatgaaaggttgggcttcggaatcgttttccgggacgccggctggatgatcctccagcgcggggatctcatgctggagttcttcgcccaccccaacttgtttattgcagcttataatggttacaaataaagcaatagcatcacaaatttcacaaataaagcatttttttcactgcattctagttgtggtttgtccaaactcatcaatgtatcttatcatgtctgtataccgtcgacctctagctagagcttggcgtaatcatggtcatagctgtttcctgtgtgaaattgttatccgctcacaattccacacaacatacgagccggaagcataaagtgtaaagcctggggtgcctaatgagtgagctaactcacattaattgcgttgcgctcactgcccgctttccagtcgggaaacctgtcgtgccagctgcattaatgaatcggccaacgcgcggggagaggcggtttgcgtattgggcgctcttccgcttcctcgctcactgactcgctgcgctcggtcgttcggctgcggcgagcggtatcagctcactcaaaggcggtaatacggttatccacagaatcaggggataacgcaggaaagaacatgtgagcaaaaggccagcaaaaggccaggaaccgtaaaaaggccgcgttgctggcgtttttccataggctccgcccccctgacgagcatcacaaaaatcgacgctcaagtcagaggtggcgaaacccgacaggactataaagataccaggcgtttccccctggaagctccctcgtgcgctctcctgttccgaccctgccgcttaccggatacctgtccgcctttctcccttcgggaagcgtggcgctttctcaatgctcacgctgtaggtatctcagttcggtgtaggtcgttcgctccaagctgggctgtgtgcacgaaccccccgttcagcccgaccgctgcgccttatccggtaactatcgtcttgagtccaacccggtaagacacgacttatcgccactggcagcagccactggtaacaggattagcagagcgaggtatgtaggcggtgctacagagttcttgaagtggtggcctaactacggctacactagaaggacagtatttggtatctgcgctctgctgaagccagttaccttcggaaaaagagttggtagctcttgatccggcaaacaaaccaccgctggtagcggtggtttttttgtttgcaagcagcagattacgcgcagaaaaaaaggatctcaagaagatcctttgatcttttctacggggtctgacgctcagtggaacgaaaactcacgttaagggattttggtcatgagattatcaaaaaggatcttcacctagatccttttaaattaaaaatgaagttttaaatcaatctaaagtatatatgagtaaacttggtctgacagttaccaatgcttaatcagtgaggcacctatctcagcgatctgtctatttcgttcatccatagttgcctgactccccgtcgtgtagataactacgatacgggagggcttaccatctggccccagtgctgcaatgataccgcgagacccacgctcaccggctccagatttatcagcaataaaccagccagccggaagggccgagcgcagaagtggtcctgcaactttatccgcctccatccagtctattaattgttgccgggaagctagagtaagtagttcgccagttaatagtttgcgcaacgttgttgccattgctacaggcatcgtggtgtcacgctcgtcgtttggtatggcttcattcagctccggttcccaacgatcaaggcgagttacatgatcccccatgttgtgcaaaaaagcggttagctccttcggtcctccgatcgttgtcagaagtaagttggccgcagtgttatcactcatggttatggcagcactgcataattctcttactgtcatgccatccgtaagatgcttttctgtgactggtgagtactcaaccaagtcattctgagaatagtgtatgcggcgaccgagttgctcttgcccggcgtcaatacgggataataccgcgccacatagcagaactttaaaagtgctcatcattggaaaacgttcttcggggcgaaaactctcaaggatcttaccgctgttgagatccagttcgatgtaacccactcgtgcacccaactgatcttcagcatcttttactttcaccagcgtttctgggtgagcaaaaacaggaaggcaaaatgccgcaaaaaagggaataagggcgacacggaaatgttgaatactcatactcttcctttttcattattattgaagcatttatcagggttattgtctcatgagcggatacatatttgaatgtatttagaaaaataaacaaataggggttccgcgcacatttccccgaaaagtgccacctgacgtc

SEQ ID NO: 24 - DNA, 6463 bp, synthetic construct
  source 1..6463: mol_type = other DNA
gacggatcgggagatctcccgatcccctatggtcgactctcagtacaatctgctctgatgccgcatagttaagccagtatctgctccctgcttgtgtgttggaggtcgctgagtagtgcgcgagcaaaatttaagctacaacaaggcaaggcttgaccgacaattgcatgaagaatctgcttagggttaggcgttttgcgctgcttcgcgatgtacgggccagatatacgcgttgacattgattattgactagttattaatagtaatcaattacggggtcattagttcatagcccatatatggagttccgcgttacataacttacggtaaatggcccgcctggctgaccgcccaacgacccccgcccattgacgtcaataatgacgtatgttcccatagtaacgccaatagggactttccattgacgtcaatgggtggactatttacggtaaactgcccacttggcagtacatcaagtgtatcatatgccaagtacgccccctattgacgtcaatgacggtaaatggcccgcctggcattatgcccagtacatgaccttatgggactttcctacttggcagtacatctacgtattagtcatcgctattaccatggtgatgcggttttggcagtacatcaatgggcgtggatagcggtttgactcacggggatttccaagtctccaccccattgacgtcaatgggagtttgttttggcaccaaaatcaacgggactttccaaaatgtcgtaacaactccgccccattgacgcaaatgggcggtaggcgtgtacggtgggaggtctatataagcagagctctctggctaactagagaacccactgcttactggcttatcgaaattaatacgactcactatagggagacccaagcttggtaccgagctcggatccgccaccatgggcaaacggacagccgacggaagcgagttcgagtcaccgaaaaagaagcgaaaagttggctccggaatgtccgagacaagagaggcaaggatctctcgcgcaaagagggcctttgtgagcacaccctccgtgcgcaagatcctgtcctatatggatcgctgccgggacctgtccgatctggagtctgagcctacctgtatgatggtgtacggcgcctctggcgtgggcaagaccacagtgatcaagaagtatctgaatcagaataggagggagagcgaggcaggaggcgacatcatccccgtgctgcacatcgagctgcctgacaacgccaagccagtggatgccgccagagagctgctggtggagatgggcgaccctctggccctgtacgagacagatctggccagactgacaaagaggctgaccgagctgatcccagcagtgggagtgaagctgatcatcatcgatgagttccagcacctggtggaggagagaagcaacagggtgctgacacaagtgggcaactggctgaagatgatcctgaataagaccaagtgccctatcgtgatctttggcatgccatatagcaaggtggtgctccaggccaattctcagctgcacggcagattcagcatccaggtggagctgaggccattttcctaccagggaggaaggggcgtgttcaagacctttctggagtatctggacaaggccctgcccttcgagaagcaggcaggactggccaacgagtctctccagaagaagctgtacgccttttcccagggcaacatgcgctctctgcggaatctgatctatcaggcctccatcgaggccatcgacaatcagcacgaaaccatcacagaggaggatttcgtgtttgccagcaagctgacatccggcgacaagccaaacagctggaagaatcccttcgaggagggcgtggaggtgacagaggatatgctgcggccaccccccaaggacatcggctgggaggattacctgagacactccacccccagggtgtctaagcctggcagaaacaagaatttctttgagtaattacattggaagtggataatctagagggccctattctatagtgtcacctaaatgctagagctcgctgatcagcctcgactgtgccttctagttgccagccatctgttgtttgcccctcccccgtgccttccttgaccctggaaggtgccactcccactgtcctttcctaataaaatgaggaaattgcatcgcattgtctgagtaggtgtcattctattctggggggtggggtggggcaggacagcaagggggaggattgggaagacaatagcaggcatgctggggatgcggtgggctctatggcttctgaggcggaaagaaccagctggggctctagggggtatccccacgcgccctgtagcggcgcattaagcgcggcgggtgtggtggttacgcgcagcgtgaccgctacacttgccagcgccctagcgcccgctcctttcgctttcttcccttcctttctcgccacgttcgccggctttccccgtcaagctctaaatcggggcatccctttagggttccgatttagtgctttacggcacctcgaccccaaaaaacttgattagggtgatggttcacgtagtgggccatcgccctgatagacggtttttcgccctttgacgttggagtccacgttctttaatagtggactcttgttccaaactggaacaacactcaaccctatctcggtctattcttttgatttataagggattttggggatttcggcctattggttaaaaaatgagctgatttaacaaaaatttaacgcgaattaattctgtggaatgtgtgtcagttagggtgtggaaagtccccaggctccccaggcaggcagaagtatgcaaagcatgcatctcaattagtcagcaaccaggtgtggaaagtccccaggctccccagcaggcagaagtatgcaaagcatgcatctcaattagtcagcaaccatagtcccgcccctaactccgcccatcccgcccctaactccgcccagttccgcccattctccgccccatggctgactaattttttttatttatgcagaggccgaggccgcctctgcctctgagctattccagaagtagtgaggaggcttttttggaggcctaggcttttgcaaaaagctcccgggagcttgtatatccattttcggatctgatcaagagacaggatgaggatcgtttcgcatgattgaacaagatggattgcacgcaggttctccggccgcttgggtggagaggctattcggctatgactgggcacaacagacaatcggctgctctgatgccgccgtgttccggctgtcagcgcaggggcgcccggttctttttgtcaagaccgacctgtccggtgccctgaatgaactgcaggacgaggcagcgcggctatcgtggctggccacgacgggcgttccttgcgcagctgtgctcgacgttgtcactgaagcgggaagggactggctgctattgggcgaagtgccggggcaggatctcctgtcatctcaccttgctcctgccgagaaagtatccatcatggctgatgcaatgcggcggctgcatacgcttgatccggctacctgcccattcgaccaccaagcgaaacatcgcatcgagcgagcacgtactcggatggaagccggtcttgtcgatcaggatgatctggacgaagagcatcaggggctcgcgccagccgaactgttcgccaggctcaaggcgcgcatgcccgacggcgaggatctcgtcgtgacccatggcgatgcctgcttgccgaatatcatggtggaaaatggccgcttttctggattcatcgactgtggccggctgggtgtggcggaccgctatcaggacatagcgttggctacccgtgatattgctgaagagcttggcggcgaatgggctgaccgcttcctcgtgctttacggtatcgccgctcccgattcgcagcgcatcgccttctatcgccttcttgacgagttcttctgagcgggactctggggttcgaaatgaccgaccaagcgacgcccaacctgccatcacgagatttcgattccaccgccgccttctatgaaaggttgggcttcggaatcgttttccgggacgccggctggatgatcctccagcgcggggatctcatgctggagttcttcgcccaccccaacttgtttattgcagcttataatggttacaaataaagcaatagcatcacaaatttcacaaataaagcatttttttcactgcattctagttgtggtttgtccaaactcatcaatgtatcttatcatgtctgtataccgtcgacctctagctagagcttggcgtaatcatggtcatagctgtttcctgtgtgaaattgttatccgctcacaattccacacaacatacgagccggaagcataaagtgtaaagcctggggtgcctaatgagtgagctaactcacattaattgcgttgcgctcactgcccgctttccagtcgggaaacctgtcgtgccagctgcattaatgaatcggccaacgcgcggggagaggcggtttgcgtattgggcgctcttccgcttcctcgctcactgactcgctgcgctcggtcgttcggctgcggcgagcggtatcagctcactcaaaggcggtaatacggttatccacagaatcaggggataacgcaggaaagaacatgtgagcaaaaggccagcaaaaggccaggaaccgtaaaaaggccgcgttgctggcgtttttccataggctccgcccccctgacgagcatcacaaaaatcgacgctcaagtcagaggtggcgaaacccgacaggactataaagataccaggcgtttccccctggaagctccctcgtgcgctctcctgttccgaccctgccgcttaccggatacctgtccgcctttctcccttcgggaagcgtggcgctttctcaatgctcacgctgtaggtatctcagttcggtgtaggtcgttcgctccaagctgggctgtgtgcacgaaccccccgttcagcccgaccgctgcgccttatccggtaactatcgtcttgagtccaacccggtaagacacgacttatcgccactggcagcagccactggtaacaggattagcagagcgaggtatgtaggcggtgctacagagttcttgaagtggtggcctaactacggctacactagaaggacagtatttggtatctgcgctctgctgaagccagttaccttcggaaaaagagttggtagctcttgatccggcaaacaaaccaccgctggtagcggtggtttttttgtttgcaagcagcagattacgcgcagaaaaaaaggatctcaagaagatcctttgatcttttctacggggtctgacgctcagtggaacgaaaactcacgttaagggattttggtcatgagattatcaaaaaggatcttcacctagatccttttaaattaaaaatgaagttttaaatcaatctaaagtatatatgagtaaacttggtctgacagttaccaatgcttaatcagtgaggcacctatctcagcgatctgtctatttcgttcatccatagttgcctgactccccgtcgtgtagataactacgatacgggagggcttaccatctggccccagtgctgcaatgataccgcgagacccacgctcaccggctccagatttatcagcaataaaccagccagccggaagggccgagcgcagaagtggtcctgcaactttatccgcctccatccagtctattaattgttgccgggaagctagagtaagtagttcgccagttaatagtttgcgcaacgttgttgccattgctacaggcatcgtggtgtcacgctcgtcgtttggtatggcttcattcagctccggttcccaacgatcaaggcgagttacatgatcccccatgttgtgcaaaaaagcggttagctccttcggtcctccgatcgttgtcagaagtaagttggccgcagtgttatcactcatggttatggcagcactgcataattctcttactgtcatgccatccgtaagatgcttttctgtgactggtgagtactcaaccaagtcattctgagaatagtgtatgcggcgaccgagttgctcttgcccggcgtcaatacgggataataccgcgccacatagcagaactttaaaagtgctcatcattggaaaacgttcttcggggcgaaaactctcaaggatcttaccgctgttgagatccagttcgatgtaacccactcgtgcacccaactgatcttcagcatcttttactttcaccagcgtttctgggtgagcaaaaacaggaaggcaaaatgccgcaaaaaagggaataagggcgacacggaaatgttgaatactcatactcttcctttttcattattattgaagcatttatcagggttattgtctcatgagcggatacatatttgaatgtatttagaaaaataaacaaataggggttccgcgcacatttccccgaaaagtgccacctgacgtc

SEQ ID NO: 25 - DNA, 7985 bp, synthetic construct
  source 1..7985: mol_type = other DNA
gacggatcgggagatctcccgatcccctatggtcgactctcagtacaatctgctctgatgccgcatagttaagccagtatctgctccctgcttgtgtgttggaggtcgctgagtagtgcgcgagcaaaatttaagctacaacaaggcaaggcttgaccgacaattgcatgaagaatctgcttagggttaggcgttttgcgctgcttcgcgatgtacgggccagatatacgcgttgacattgattattgactagttattaatagtaatcaattacggggtcattagttcatagcccatatatggagttccgcgttacataacttacggtaaatggcccgcctggctgaccgcccaacgacccccgcccattgacgtcaataatgacgtatgttcccatagtaacgccaatagggactttccattgacgtcaatgggtggactatttacggtaaactgcccacttggcagtacatcaagtgtatcatatgccaagtacgccccctattgacgtcaatgacggtaaatggcccgcctggcattatgcccagtacatgaccttatgggactttcctacttggcagtacatctacgtattagtcatcgctattaccatggtgatgcggttttggcagtacatcaatgggcgtggatagcggtttgactcacggggatttccaagtctccaccccattgacgtcaatgggagtttgttttggcaccaaaatcaacgggactttccaaaatgtcgtaacaactccgccccattgacgcaaatgggcggtaggcgtgtacggtgggaggtctatataagcagagctctctggctaactagagaacccactgcttactggcttatcgaaattaatacgactcactatagggagacccagccaccatggccacatccctgccaaccccctctgccatcaccacaagcgccctggagtacgccttccacacaccagcaaggaacctgaccaagtcccgcggcaagaatatccacagatacgtgagcgtgaagatgagcaagaggatcacagtggagtccaccctggagtgcgacgcctgttaccacttcgattttgagccatctatcgtgcgcttctgtgcccagcccatccggtttctgtactatctgaacggccagagccactcctatgtgcctgacttcctggtgcagtttgataccaacgagttcgtgctgtacgaggtgaaaagcgcctatgccaagaataagccagactttgatgtggagtgggaggccaaggtgaaggcagcaacagagctgggcctggagctggagctggtggaggagtccgacatccgcgataccgtggtgctgaacaatctgaagcgcatgcaccgctacgcctccaaggacgagctgaacaatgtgcacaactctctgctgaagatcatcaagtataatggagcacagtccgccaggtgcctgggagagcagctgggcctgaagggaaggacagtgctgccaatcctgtgcgatctgctgtctaggtgtctgctggacacccgcctggataagcccctgtccctggagtctcggttcgagctggcaagctacggaggcagcggctccggaaaacggacagccgacggaagcgagttcgagtcaccaaagaagaagcggaaagtcggatccggctctggaggcgccaagaagggcttcagctcctttcaccgcaaggccgtgtctagccaggacaccctggagagcatcgagctggtgtcctctgccaactgcctggagagcgtgacataccaggacatctccgccttccctgaaaccatcgccgtggagatcaatttcagactgagcatcctgagatttctggccaggaagtgtgagacaatcgtggccaagtccatcgagcctcaccgggtggagctgcaacagaactatagccggaagatcccaagcgccatcaccatctaccgctggtggctggcctttcggaaaagcgactataatccaatctccctggcccccaacatcaaggatagaggcaatagggagacaaaggtgtccaccgtggtggactctatcatggagcaggcagtggagcgcgtgatcagcggacggaaggtgaacgtgagttccgcctataagagagtgcggagaaaggtgaggcagtacaatctgacccacggcacaaagtacacctatcccaagtacgagtccgtgagaaagagggtgaagaagaaaacccctttcgagctgctggcagcaggcaagggagagagggtggccaagcgggagtttaggcgcatgggcaagaagatcctgacatctagcgtgctggagcgggtggagatcgaccacaccgtggtggatctgttcgccgtgcacgaggagtatagaatccctctgggcaggccctggctgacccagctggtggactgctactctaaggccgtgatcggcttctatctgggctttgagccccctagctacgtgtctgtgagcctggccctgaagaacgccatccagagaaaggacgatctgatctcctcttatgagagcatcgagaacgagtggctgtgctacggcatcccagacctgctggtgacagataatggcaaggagttcctgagcaaggcctttgaccaggcctgtgagtccctgctgatcaacgtgcaccagaataaggtggagacacccgataataagcctcacgtcgagaggaactacggcacaatcaataccagcctgctggacgatctgcccggcaagtccttctctcagtacctccagagggagggatatgactccgtgggagaggccaccctgacactgaacgagatcagagagatctatctgatctggctggtggatatttaccacaagaagcccaatcagcgcggcaccaactgccctaatgtggcctggaagaagggctgtcaggagtgggagcctgaagagtttagcggctccaaggacgagctggatttcaagtttgccatcgtggactacaagcagctgacaaaagtgggcatcaccgtgtacaaggagctgtcttatagcaacgataggctggcagagtacaggggcaagaagggaaaccacaaggtgcagttcaagtataatccagagtgtatggccgtgatctgggtgctggacgaggatatgaacgagtactttacagtgaatgccatcgattacgagtatgcctctcgggtgagcctgtggcagcacaagtacaacatgaagtatcaggccgagctgaatagcgccgagtatgacgaggataaggagatcgacgccgagatcaagatcgaggagatcgccgatagatccatcgtgaaaaccaacaagatcagggcacggagaaggggagcaagacaccaggagaactctgccagggccaagtccatctctaacgccaatcctgcctctatccagaagcacgaggacgagatcgtgagcgccgataacgacgattgggacatcgattacgtgtaactgcagatatccatcacactggcggccgctcgagcatgcatctagagggccctattctatagtgtcacctaaatgctagagctcgctgatcagcctcgactgtgccttctagttgccagccatctgttgtttgcccctcccccgtgccttccttgaccctggaaggtgccactcccactgtcctttcctaataaaatgaggaaattgcatcgcattgtctgagtaggtgtcattctattctggggggtggggtggggcaggacagcaagggggaggattgggaagacaatagcaggcatgctggggatgcggtgggctctatggcttctgaggcggaaagaaccagctggggctctagggggtatccccacgcgccctgtagcggcgcattaagcgcggcgggtgtggtggttacgcgcagcgtgaccgctacacttgccagcgccctagcgcccgctcctttcgctttcttcccttcctttctcgccacgttcgccggctttccccgtcaagctctaaatcggggcatccctttagggttccgatttagtgctttacggcacctcgaccccaaaaaacttgattagggtgatggttcacgtagtgggccatcgccctgatagacggtttttcgccctttgacgttggagtccacgttctttaatagtggactcttgttccaaactggaacaacactcaaccctatctcggtctattcttttgatttataagggattttggggatttcggcctattggttaaaaaatgagctgatttaacaaaaatttaacgcgaattaattctgtggaatgtgtgtcagttagggtgtggaaagtccccaggctccccaggcaggcagaagtatgcaaagcatgcatctcaattagtcagcaaccaggtgtggaaagtccccaggctccccagcaggcagaagtatgcaaagcatgcatctcaattagtcagcaaccatagtcccgcccctaactccgcccatcccgcccctaactccgcccagttccgcccattctccgccccatggctgactaattttttttatttatgcagaggccgaggccgcctctgcctctgagctattccagaagtagtgaggaggcttttttggaggcctaggcttttgcaaaaagctcccgggagcttgtatatccattttcggatctgatcaagagacaggatgaggatcgtttcgcatgattgaacaagatggattgcacgcaggttctccggccgcttgggtggagaggctattcggctatgactgggcacaacagacaatcggctgctctgatgccgccgtgttccggctgtcagcgcaggggcgcccggttctttttgtcaagaccgacctgtccggtgccctgaatgaactgcaggacgaggcagcgcggctatcgtggctggccacgacgggcgttccttgcgcagctgtgctcgacgttgtcactgaagcgggaagggactggctgctattgggcgaagtgccggggcaggatctcctgtcatctcaccttgctcctgccgagaaagtatccatcatggctgatgcaatgcggcggctgcatacgcttgatccggctacctgcccattcgaccaccaagcgaaacatcgcatcgagcgagcacgtactcggatggaagccggtcttgtcgatcaggatgatctggacgaagagcatcaggggctcgcgccagccgaactgttcgccaggctcaaggcgcgcatgcccgacggcgaggatctcgtcgtgacccatggcgatgcctgcttgccgaatatcatggtggaaaatggccgcttttctggattcatcgactgtggccggctgggtgtggcggaccgctatcaggacatagcgttggctacccgtgatattgctgaagagcttggcggcgaatgggctgaccgcttcctcgtgctttacggtatcgccgctcccgattcgcagcgcatcgccttctatcgccttcttgacgagttcttctgagcgggactctggggttcgaaatgaccgaccaagcgacgcccaacctgccatcacgagatttcgattccaccgccgccttctatgaaaggttgggcttcggaatcgttttccgggacgccggctggatgatcctccagcgcggggatctcatgctggagttcttcgcccaccccaacttgtttattgcagcttataatggttacaaataaagcaatagcatcacaaatttcacaaataaagcatttttttcactgcattctagttgtggtttgtccaaactcatcaatgtatcttatcatgtctgtataccgtcgacctctagctagagcttggcgtaatcatggtcatagctgtttcctgtgtgaaattgttatccgctcacaattccacacaacatacgagccggaagcataaagtgtaaagcctggggtgcctaatgagtgagctaactcacattaattgcgttgcgctcactgcccgctttccagtcgggaaacctgtcgtgccagctgcattaatgaatcggccaacgcgcggggagaggcggtttgcgtattgggcgctcttccgcttcctcgctcactgactcgctgcgctcggtcgttcggctgcggcgagcggtatcagctcactcaaaggcggtaatacggttatccacagaatcaggggataacgcaggaaagaacatgtgagcaaaaggccagcaaaaggccaggaaccgtaaaaaggccgcgttgctggcgtttttccataggctccgcccccctgacgagcatcacaaaaatcgacgctcaagtcagaggtggcgaaacccgacaggactataaagataccaggcgtttccccctggaagctccctcgtgcgctctcctgttccgaccctgccgcttaccggatacctgtccgcctttctcccttcgggaagcgtggcgctttctcaatgctcacgctgtaggtatctcagttcggtgtaggtcgttcgctccaagctgggctgtgtgcacgaaccccccgttcagcccgaccgctgcgccttatccggtaactatcgtcttgagtccaacccggtaagacacgacttatcgccactggcagcagccactggtaacaggattagcagagcgaggtatgtaggcggtgctacagagttcttgaagtggtggcctaactacggctacactagaaggacagtatttggtatctgcgctctgctgaagccagttaccttcggaaaaagagttggtagctcttgatccggcaaacaaaccaccgctggtagcggtggtttttttgtttgcaagcagcagattacgcgcagaaaaaaaggatctcaagaagatcctttgatcttttctacggggtctgacgctcagtggaacgaaaactcacgttaagggattttggtcatgagattatcaaaaaggatcttcacctagatccttttaaattaaaaatgaagttttaaatcaatctaaagtatatatgagtaaacttggtctgacagttaccaatgcttaatcagtgaggcacctatctcagcgatctgtctatttcgttcatccatagttgcctgactccccgtcgtgtagataactacgatacgggagggcttaccatctggccccagtgctgcaatgataccgcgagacccacgctcaccggctccagatttatcagcaataaaccagccagccggaagggccgagcgcagaagtggtcctgcaactttatccgcctccatccagtctattaattgttgccgggaagctagagtaagtagttcgccagttaatagtttgcgcaacgttgttgccattgctacaggcatcgtggtgtcacgctcgtcgtttggtatggcttcattcagctccggttcccaacgatcaaggcgagttacatgatcccccatgttgtgcaaaaaagcggttagctccttcggtcctccgatcgttgtcagaagtaagttggccgcagtgttatcactcatggttatggcagcactgcataattctcttactgtcatgccatccgtaagatgcttttctgtgactggtgagtactcaaccaagtcattctgagaatagtgtatgcggcgaccgagttgctcttgcccggcgtcaatacgggataataccgcgccacatagcagaactttaaaagtgctcatcattggaaaacgttcttcggggcgaaaactctcaaggatcttaccgctgttgagatccagttcgatgtaacccactcgtgcacccaactgatcttcagcatcttttactttcaccagcgtttctgggtgagcaaaaacaggaaggcaaaatgccgcaaaaaagggaataagggcgacacggaaatgttgaatactcatactcttcctttttcattattattgaagcatttatcagggttattgtctcatgagcggatacatatttgaatgtatttagaaaaataaacaaataggggttccgcgcacatttccccgaaaagtgccacctgacgtc

SEQ ID NO: 26 - DNA, 6740 bp, synthetic construct
  source 1..6740: mol_type = other DNA
gacggatcgggagatctcccgatcccctatggtcgactctcagtacaatctgctctgatgccgcatagttaagccagtatctgctccctgcttgtgtgttggaggtcgctgagtagtgcgcgagcaaaatttaagctacaacaaggcaaggcttgaccgacaattgcatgaagaatctgcttagggttaggcgttttgcgctgcttcgcgatgtacgggccagatatacgcgttgacattgattattgactagttattaatagtaatcaattacggggtcattagttcatagcccatatatggagttccgcgttacataacttacggtaaatggcccgcctggctgaccgcccaacgacccccgcccattgacgtcaataatgacgtatgttcccatagtaacgccaatagggactttccattgacgtcaatgggtggactatttacggtaaactgcccacttggcagtacatcaagtgtatcatatgccaagtacgccccctattgacgtcaatgacggtaaatggcccgcctggcattatgcccagtacatgaccttatgggactttcctacttggcagtacatctacgtattagtcatcgctattaccatggtgatgcggttttggcagtacatcaatgggcgtggatagcggtttgactcacggggatttccaagtctccaccccattgacgtcaatgggagtttgttttggcaccaaaatcaacgggactttccaaaatgtcgtaacaactccgccccattgacgcaaatgggcggtaggcgtgtacggtgggaggtctatataagcagagctctctggctaactagagaacccactgcttactggcttatcgaaattaatacgactcactatagggagacccaagcttggtaccgagctcggccaccatgggaagcggcgaggccagcggttccggacgggctgacgcattggacgattttgatctggatatgctgggaagtgacgccctcgatgattttgaccttgacatgcttggttcggatgcccttgatgactttgacctcgacatgctcggcagtgacgcccttgatgatttcgacctggacatgctgattaactctagaggtggtagtggtgggagcggtggcaaacggacagccgacggaagcgagttcgagtcaccgaaaaagaagcgaaaagttggctccggaatgaagctgccaaccaacctggcctacgagcggagcatcgaccccagcgacgtgtgcttcttcgtggtgtggccagacgataggaaaacccccctgacatacaattcccgcacactgctgggacagatggaggcagccagcctggcatacgacgtgtccggccagcctatcaagtctgccaccgcagaggccctggcacagggcaaccctcaccaggtggatttctgccatgtgccatacggcgccagccacatcgagtgtagcttctccgtgtcttttagctccgagctgcggcagccatataagtgtaattctagcaaggtgaagcagacactggtgcagctggtggagctgtacgaaaccaagatcggctggacagagctggccacccggtatctgatgaatatctgcaacggcaagtggctgtggaagaatacaagaaaggcctactgttggaacatcgtgctgaccccctggccttggaatggcgagaaagtgggcttcgaggacatcaggaccaactatacatcccgccaggacttcaagaacaataagaattggtctgccatcgtggagatgatcaagacagccttctcctctaccgacggcctggccatctttgaggtgagggccacactgcacctgccaaccaacgcaatggtgcgccctagccaggtgttcacagagaaggagagcggctccaagtctaagagcaagacccagaactctagggtgttccagagcaccacaatcgatggagagcggagcccaatcctgggagcctttaagacaggcgccgccatcgccaccatcgacgattggtatccagaggcaaccgagcctctgagggtgggccgctttggagtgcacagggaggacgtgacatgctacagacacccatctaccggcaaggatttctttagcatcctccagcaggccgagcactatatcgaggtgctgagtgccaacaagacacccgcccaggaaaccatcaatgacatgcacttcctgatggccaacctgatcaagggcggcatgtttcagcacaagggcgactaattacattggaagtggataatctagagggccctattctatagtgtcacctaaatgctagagctcgctgatcagcctcgactgtgccttctagttgccagccatctgttgtttgcccctcccccgtgccttccttgaccctggaaggtgccactcccactgtcctttcctaataaaatgaggaaattgcatcgcattgtctgagtaggtgtcattctattctggggggtggggtggggcaggacagcaagggggaggattgggaagacaatagcaggcatgctggggatgcggtgggctctatggcttctgaggcggaaagaaccagctggggctctagggggtatccccacgcgccctgtagcggcgcattaagcgcggcgggtgtggtggttacgcgcagcgtgaccgctacacttgccagcgccctagcgcccgctcctttcgctttcttcccttcctttctcgccacgttcgccggctttccccgtcaagctctaaatcggggcatccctttagggttccgatttagtgctttacggcacctcgaccccaaaaaacttgattagggtgatggttcacgtagtgggccatcgccctgatagacggtttttcgccctttgacgttggagtccacgttctttaatagtggactcttgttccaaactggaacaacactcaaccctatctcggtctattcttttgatttataagggattttggggatttcggcctattggttaaaaaatgagctgatttaacaaaaatttaacgcgaattaattctgtggaatgtgtgtcagttagggtgtggaaagtccccaggctccccaggcaggcagaagtatgcaaagcatgcatctcaattagtcagcaaccaggtgtggaaagtccccaggctccccagcaggcagaagtatgcaaagcatgcatctcaattagtcagcaaccatagtcccgcccctaactccgcccatcccgcccctaactccgcccagttccgcccattctccgccccatggctgactaattttttttatttatgcagaggccgaggccgcctctgcctctgagctattccagaagtagtgaggaggcttttttggaggcctaggcttttgcaaaaagctcccgggagcttgtatatccattttcggatctgatcaagagacaggatgaggatcgtttcgcatgattgaacaagatggattgcacgcaggttctccggccgcttgggtggagaggctattcggctatgactgggcacaacagacaatcggctgctctgatgccgccgtgttccggctgtcagcgcaggggcgcccggttctttttgtcaagaccgacctgtccggtgccctgaatgaactgcaggacgaggcagcgcggctatcgtggctggccacgacgggcgttccttgcgcagctgtgctcgacgttgtcactgaagcgggaagggactggctgctattgggcgaagtgccggggcaggatctcctgtcatctcaccttgctcctgccgagaaagtatccatcatggctgatgcaatgcggcggctgcatacgcttgatccggctacctgcccattcgaccaccaagcgaaacatcgcatcgagcgagcacgtactcggatggaagccggtcttgtcgatcaggatgatctggacgaagagcatcaggggctcgcgccagccgaactgttcgccaggctcaaggcgcgcatgcccgacggcgaggatctcgtcgtgacccatggcgatgcctgcttgccgaatatcatggtggaaaatggccgcttttctggattcatcgactgtggccggctgggtgtggcggaccgctatcaggacatagcgttggctacccgtgatattgctgaagagcttggcggcgaatgggctgaccgcttcctcgtgctttacggtatcgccgctcccgattcgcagcgcatcgccttctatcgccttcttgacgagttcttctgagcgggactctggggttcgaaatgaccgaccaagcgacgcccaacctgccatcacgagatttcgattccaccgccgccttctatgaaaggttgggcttcggaatcgttttccgggacgccggctggatgatcctccagcgcggggatctcatgctggagttcttcgcccaccccaacttgtttattgcagcttataatggttacaaataaagcaatagcatcacaaatttcacaaataaagcatttttttcactgcattctagttgtggtttgtccaaactcatcaatgtatcttatcatgtctgtataccgtcgacctctagctagagcttggcgtaatcatggtcatagctgtttcctgtgtgaaattgttatccgctcacaattccacacaacatacgagccggaagcataaagtgtaaagcctggggtgcctaatgagtgagctaactcacattaattgcgttgcgctcactgcccgctttccagtcgggaaacctgtcgtgccagctgcattaatgaatcggccaacgcgcggggagaggcggtttgcgtattgggcgctcttccgcttcctcgctcactgactcgctgcgctcggtcgttcggctgcggcgagcggtatcagctcactcaaaggcggtaatacggttatccacagaatcaggggataacgcaggaaagaacatgtgagcaaaaggccagcaaaaggccaggaaccgtaaaaaggccgcgttgctggcgtttttccataggctccgcccccctgacgagcatcacaaaaatcgacgctcaagtcagaggtggcgaaacccgacaggactataaagataccaggcgtttccccctggaagctccctcgtgcgctctcctgttccgaccctgccgcttaccggatacctgtccgcctttctcccttcgggaagcgtggcgctttctcaatgctcacgctgtaggtatctcagttcggtgtaggtcgttcgctccaagctgggctgtgtgcacgaaccccccgttcagcccgaccgctgcgccttatccggtaactatcgtcttgagtccaacccggtaagacacgacttatcgccactggcagcagccactggtaacaggattagcagagcgaggtatgtaggcggtgctacagagttcttgaagtggtggcctaactacggctacactagaaggacagtatttggtatctgcgctctgctgaagccagttaccttcggaaaaagagttggtagctcttgatccggcaaacaaaccaccgctggtagcggtggtttttttgtttgcaagcagcagattacgcgcagaaaaaaaggatctcaagaagatcctttgatcttttctacggggtctgacgctcagtggaacgaaaactcacgttaagggattttggtcatgagattatcaaaaaggatcttcacctagatccttttaaattaaaaatgaagttttaaatcaatctaaagtatatatgagtaaacttggtctgacagttaccaatgcttaatcagtgaggcacctatctcagcgatctgtctatttcgttcatccatagttgcctgactccccgtcgtgtagataactacgatacgggagggcttaccatctggccccagtgctgcaatgataccgcgagacccacgctcaccggctccagatttatcagcaataaaccagccagccggaagggccgagcgcagaagtggtcctgcaactttatccgcctccatccagtctattaattgttgccgggaagctagagtaagtagttcgccagttaatagtttgcgcaacgttgttgccattgctacaggcatcgtggtgtcacgctcgtcgtttggtatggcttcattcagctccggttcccaacgatcaaggcgagttacatgatcccccatgttgtgcaaaaaagcggttagctccttcggtcctccgatcgttgtcagaagtaagttggccgcagtgttatcactcatggttatggcagcactgcataattctcttactgtcatgccatccgtaagatgcttttctgtgactggtgagtactcaaccaagtcattctgagaatagtgtatgcggcgaccgagttgctcttgcccggcgtcaatacgggataataccgcgccacatagcagaactttaaaagtgctcatcattggaaaacgttcttcggggcgaaaactctcaaggatcttaccgctgttgagatccagttcgatgtaacccactcgtgcacccaactgatcttcagcatcttttactttcaccagcgtttctgggtgagcaaaaacaggaaggcaaaatgccgcaaaaaagggaataagggcgacacggaaatgttgaatactcatactcttcctttttcattattattgaagcatttatcagggttattgtctcatgagcggatacatatttgaatgtatttagaaaaataaacaaataggggttccgcgcacatttccccgaaaagtgccacctgacgtc

SEQ ID NO: 27 - DNA, 6659 bp, synthetic construct
  source 1..6659: mol_type = other DNA
gacggatcgggagatctcccgatcccctatggtcgactctcagtacaatctgctctgatgccgcatagttaagccagtatctgctccctgcttgtgtgttggaggtcgctgagtagtgcgcgagcaaaatttaagctacaacaaggcaaggcttgaccgacaattgcatgaagaatctgcttagggttaggcgttttgcgctgcttcgcgatgtacgggccagatatacgcgttgacattgattattgactagttattaatagtaatcaattacggggtcattagttcatagcccatatatggagttccgcgttacataacttacggtaaatggcccgcctggctgaccgcccaacgacccccgcccattgacgtcaataatgacgtatgttcccatagtaacgccaatagggactttccattgacgtcaatgggtggactatttacggtaaactgcccacttggcagtacatcaagtgtatcatatgccaagtacgccccctattgacgtcaatgacggtaaatggcccgcctggcattatgcccagtacatgaccttatgggactttcctacttggcagtacatctacgtattagtcatcgctattaccatggtgatgcggttttggcagtacatcaatgggcgtggatagcggtttgactcacggggatttccaagtctccaccccattgacgtcaatgggagtttgttttggcaccaaaatcaacgggactttccaaaatgtcgtaacaactccgccccattgacgcaaatgggcggtaggcgtgtacggtgggaggtctatataagcagagctctctggctaactagagaacccactgcttactggcttatcgaaattaatacgactcactatagggagacccaagcttggtaccgagctcggatccctacttccaatccaatgccaccatgggctccgagacaagagaggcaaggatctctcgcgcaaagagggcctttgtgagcacaccctccgtgcgcaagatcctgtcctatatggatcgctgccgggacctgtccgatctggagtctgagcctacctgtatgatggtgtacggcgcctctggcgtgggcaagaccacagtgatcaagaagtatctgaatcagaataggagggagagcgaggcaggaggcgacatcatccccgtgctgcacatcgagctgcctgacaacgccaagccagtggatgccgccagagagctgctggtggagatgggcgaccctctggccctgtacgagacagatctggccagactgacaaagaggctgaccgagctgatcccagcagtgggagtgaagctgatcatcatcgatgagttccagcacctggtggaggagagaagcaacagggtgctgacacaagtgggcaactggctgaagatgatcctgaataagaccaagtgccctatcgtgatctttggcatgccatatagcaaggtggtgctccaggccaattctcagctgcacggcagattcagcatccaggtggagctgaggccattttcctaccagggaggaaggggcgtgttcaagacctttctggagtatctggacaaggccctgcccttcgagaagcaggcaggactggccaacgagtctctccagaagaagctgtacgccttttcccagggcaacatgcgctctctgcggaatctgatctatcaggcctccatcgaggccatcgacaatcagcacgaaaccatcacagaggaggatttcgtgtttgccagcaagctgacatccggcgacaagccaaacagctggaagaatcccttcgaggagggcgtggaggtgacagaggatatgctgcggccaccccccaaggacatcggctgggaggattacctgagacactccacccccagggtgtctaagcctggcagaaacaagaatttctttgagggctccggaaaacggacagccgacggaagcgagttcgagtcaccgaaaaagaagcgaaaagttggtggtagtggtggaagcggcgaggccagcggttccggacgggctgacgcattggacgattttgatctggatatgctgggaagtgacgccctcgatgattttgaccttgacatgcttggttcggatgcccttgatgactttgacctcgacatgctcggcagtgacgcccttgatgatttcgacctggacatgctgattaactctagataaagggccctattctatagtgtcacctaaatgctagagctcgctgatcagcctcgactgtgccttctagttgccagccatctgttgtttgcccctcccccgtgccttccttgaccctggaaggtgccactcccactgtcctttcctaataaaatgaggaaattgcatcgcattgtctgagtaggtgtcattctattctggggggtggggtggggcaggacagcaagggggaggattgggaagacaatagcaggcatgctggggatgcggtgggctctatggcttctgaggcggaaagaaccagctggggctctagggggtatccccacgcgccctgtagcggcgcattaagcgcggcgggtgtggtggttacgcgcagcgtgaccgctacacttgccagcgccctagcgcccgctcctttcgctttcttcccttcctttctcgccacgttcgccggctttccccgtcaagctctaaatcggggcatccctttagggttccgatttagtgctttacggcacctcgaccccaaaaaacttgattagggtgatggttcacgtagtgggccatcgccctgatagacggtttttcgccctttgacgttggagtccacgttctttaatagtggactcttgttccaaactggaacaacactcaaccctatctcggtctattcttttgatttataagggattttggggatttcggcctattggttaaaaaatgagctgatttaacaaaaatttaacgcgaattaattctgtggaatgtgtgtcagttagggtgtggaaagtccccaggctccccaggcaggcagaagtatgcaaagcatgcatctcaattagtcagcaaccaggtgtggaaagtccccaggctccccagcaggcagaagtatgcaaagcatgcatctcaattagtcagcaaccatagtcccgcccctaactccgcccatcccgcccctaactccgcccagttccgcccattctccgccccatggctgactaattttttttatttatgcagaggccgaggccgcctctgcctctgagctattccagaagtagtgaggaggcttttttggaggcctaggcttttgcaaaaagctcccgggagcttgtatatccattttcggatctgatcaagagacaggatgaggatcgtttcgcatgattgaacaagatggattgcacgcaggttctccggccgcttgggtggagaggctattcggctatgactgggcacaacagacaatcggctgctctgatgccgccgtgttccggctgtcagcgcaggggcgcccggttctttttgtcaagaccgacctgtccggtgccctgaatgaactgcaggacgaggcagcgcggctatcgtggctggccacgacgggcgttccttgcgcagctgtgctcgacgttgtcactgaagcgggaagggactggctgctattgggcgaagtgccggggcaggatctcctgtcatctcaccttgctcctgccgagaaagtatccatcatggctgatgcaatgcggcggctgcatacgcttgatccggctacctgcccattcgaccaccaagcgaaacatcgcatcgagcgagcacgtactcggatggaagccggtcttgtcgatcaggatgatctggacgaagagcatcaggggctcgcgccagccgaactgttcgccaggctcaaggcgcgcatgcccgacggcgaggatctcgtcgtgacccatggcgatgcctgcttgccgaatatcatggtggaaaatggccgcttttctggattcatcgactgtggccggctgggtgtggcggaccgctatcaggacatagcgttggctacccgtgatattgctgaagagcttggcggcgaatgggctgaccgcttcctcgtgctttacggtatcgccgctcccgattcgcagcgcatcgccttctatcgccttcttgacgagttcttctgagcgggactctggggttcgaaatgaccgaccaagcgacgcccaacctgccatcacgagatttcgattccaccgccgccttctatgaaaggttgggcttcggaatcgttttccgggacgccggctggatgatcctccagcgcggggatctcatgctggagttcttcgcccaccccaacttgtttattgcagcttataatggttacaaataaagcaatagcatcacaaatttcacaaataaagcatttttttcactgcattctagttgtggtttgtccaaactcatcaatgtatcttatcatgtctgtataccgtcgacctctagctagagcttggcgtaatcatggtcatagctgtttcctgtgtgaaattgttatccgctcacaattccacacaacatacgagccggaagcataaagtgtaaagcctggggtgcctaatgagtgagctaactcacattaattgcgttgcgctcactgcccgctttccagtcgggaaacctgtcgtgccagctgcattaatgaatcggccaacgcgcggggagaggcggtttgcgtattgggcgctcttccgcttcctcgctcactgactcgctgcgctcggtcgttcggctgcggcgagcggtatcagctcactcaaaggcggtaatacggttatccacagaatcaggggataacgcaggaaagaacatgtgagcaaaaggccagcaaaaggccaggaaccgtaaaaaggccgcgttgctggcgtttttccataggctccgcccccctgacgagcatcacaaaaatcgacgctcaagtcagaggtggcgaaacccgacaggactataaagataccaggcgtttccccctggaagctccctcgtgcgctctcctgttccgaccctgccgcttaccggatacctgtccgcctttctcccttcgggaagcgtggcgctttctcaatgctcacgctgtaggtatctcagttcggtgtaggtcgttcgctccaagctgggctgtgtgcacgaaccccccgttcagcccgaccgctgcgccttatccggtaactatcgtcttgagtccaacccggtaagacacgacttatcgccactggcagcagccactggtaacaggattagcagagcgaggtatgtaggcggtgctacagagttcttgaagtggtggcctaactacggctacactagaaggacagtatttggtatctgcgctctgctgaagccagttaccttcggaaaaagagttggtagctcttgatccggcaaacaaaccaccgctggtagcggtggtttttttgtttgcaagcagcagattacgcgcagaaaaaaaggatctcaagaagatcctttgatcttttctacggggtctgacgctcagtggaacgaaaactcacgttaagggattttggtcatgagattatcaaaaaggatcttcacctagatccttttaaattaaaaatgaagttttaaatcaatctaaagtatatatgagtaaacttggtctgacagttaccaatgcttaatcagtgaggcacctatctcagcgatctgtctatttcgttcatccatagttgcctgactccccgtcgtgtagataactacgatacgggagggcttaccatctggccccagtgctgcaatgataccgcgagacccacgctcaccggctccagatttatcagcaataaaccagccagccggaagggccgagcgcagaagtggtcctgcaactttatccgcctccatccagtctattaattgttgccgggaagctagagtaagtagttcgccagttaatagtttgcgcaacgttgttgccattgctacaggcatcgtggtgtcacgctcgtcgtttggtatggcttcattcagctccggttcccaacgatcaaggcgagttacatgatcccccatgttgtgcaaaaaagcggttagctccttcggtcctccgatcgttgtcagaagtaagttggccgcagtgttatcactcatggttatggcagcactgcataattctcttactgtcatgccatccgtaagatgcttttctgtgactggtgagtactcaaccaagtcattctgagaatagtgtatgcggcgaccgagttgctcttgcccggcgtcaatacgggataataccgcgccacatagcagaactttaaaagtgctcatcattggaaaacgttcttcggggcgaaaactctcaaggatcttaccgctgttgagatccagttcgatgtaacccactcgtgcacccaactgatcttcagcatcttttactttcaccagcgtttctgggtgagcaaaaacaggaaggcaaaatgccgcaaaaaagggaataagggcgacacggaaatgttgaatactcatactcttcctttttcattattattgaagcatttatcagggttattgtctcatgagcggatacatatttgaatgtatttagaaaaataaacaaataggggttccgcgcacatttccccgaaaagtgccacctgacgtc

SEQ ID NO: 28 - DNA, 4789 bp, synthetic construct
  source 1..4789: mol_type = other DNA
ttgcccggcgtcaatacgggataataccgcgccacatagcagaactttaaaagtgctcatcattggaaaacgttcttcggggcgaaaactctcaaggatcttaccgctgttgagatccagttcgatgtaacccactcgtgcacccaactgatcttcagcatcttttactttcaccagcgtttctgggtgagcaaaaacaggaaggcaaaatgccgcaaaaaagggaataagggcgacacggaaatgttgaatactcatactcttcctttttcattattattgaagcatttatcagggttattgtctcatgagcggatacatatttgaatgtatttagaaaaataaacaaataggggttccgcgcacatttccccgaaaagtgccacctgacgtcgacggatcgggagatctcccgatcccctatggtcgactctcagtacaatctgctctgatgccgcatagttaagccagtatctgctccctgcttgtgtgttggaggtcgctgagtagtgcgcgagcaaaatttaagctacaacaaggcaaggcttgaccgacaattgcatgaagaatctgcttagggttaggcgttttgcgctgcttcgcgatgtacgggccagatatacgcgagggcctatttcccatgattccttcatatttgcatatacgatacaaggctgttagagagataattagaattaatttgactgtaaacacaaagatattagtacaaaatacgtgacgtagaaagtaataatttcttgggtagtttgcagttttaaaattatgttttaaaatggactatcatatgcttaccgtaacttgaaagtatttcgatttcttggctttatatatcttgtggaaaggacgaaacaccgtaatacgactcactatagggtctagaattcctgtgacctgccgtataggcagctgaagatcagtcttcgatggtcgaagacgataattctgccgaaaaggcagtgagtagtgtagcggccgctttttttcttctgaggcggaaagaaccagctggggctctagggggtatccccacgcgccctgtagcggcgcattaagcgcggcgggtgtggtggttacgcgcagcgtgaccgctacacttgccagcgccctagcgcccgctcctttcgctttcttcccttcctttctcgccacgttcgccggctttccccgtcaagctctaaatcgggggctccctttagggttccgatttagtgctttacggcacctcgaccccaaaaaacttgattagggtgatggttcacgtagtgggccatcgccctgatagacggtttttcgccctttgacgttggagtccacgttctttaatagtggactcttgttccaaactggaacaacactcaaccctatctcggtctattcttttgatttataagggattttgccgatttcggcctattggttaaaaaatgagctgatttaacaaaaatttaacgcgaattaattctgtggaatgtgtgtcagttagggtgtggaaagtccccaggctccccagcaggcagaagtatgcaaagcatgcatctcaattagtcagcaaccaggtgtggaaagtccccaggctccccagcaggcagaagtatgcaaagcatgcatctcaattagtcagcaaccatagtcccgcccctaactccgcccatcccgcccctaactccgcccagttccgcccattctccgccccatggctgactaattttttttatttatgcagaggccgaggccgcctctgcctctgagctattccagaagtagtgaggaggcttttttggaggcctaggcttttgcaaaaagctcccgggagcttgtatatccattttcggatctgatcaagagacaggatgaggatcgtttcgcatgattgaacaagatggattgcacgcaggttctccggccgcttgggtggagaggctattcggctatgactgggcacaacagacaatcggctgctctgatgccgccgtgttccggctgtcagcgcaggggcgcccggttctttttgtcaagaccgacctgtccggtgccctgaatgaactgcaggacgaggcagcgcggctatcgtggctggccacgacgggcgttccttgcgcagctgtgctcgacgttgtcactgaagcgggaagggactggctgctattgggcgaagtgccggggcaggatctcctgtcatctcaccttgctcctgccgagaaagtatccatcatggctgatgcaatgcggcggctgcatacgcttgatccggctacctgcccattcgaccaccaagcgaaacatcgcatcgagcgagcacgtactcggatggaagccggtcttgtcgatcaggatgatctggacgaagagcatcaggggctcgcgccagccgaactgttcgccaggctcaaggcgcgcatgcccgacggcgaggatctcgtcgtgacccatggcgatgcctgcttgccgaatatcatggtggaaaatggccgcttttctggattcatcgactgtggccggctgggtgtggcggaccgctatcaggacatagcgttggctacccgtgatattgctgaagagcttggcggcgaatgggctgaccgcttcctcgtgctttacggtatcgccgctcccgattcgcagcgcatcgccttctatcgccttcttgacgagttcttctgagcgggactctggggttcgaaatgaccgaccaagcgacgcccaacctgccatcacgagatttcgattccaccgccgccttctatgaaaggttgggcttcggaatcgttttccgggacgccggctggatgatcctccagcgcggggatctcatgctggagttcttcgcccaccccaacttgtttattgcagcttataatggttacaaataaagcaatagcatcacaaatttcacaaataaagcatttttttcactgcattctagttgtggtttgtccaaactcatcaatgtatcttatcatgtctgtataccgtcgacctctagctagagcttggcgtaatcatggtcatagctgtttcctgtgtgaaattgttatccgctcacaattccacacaacatacgagccggaagcataaagtgtaaagcctggggtgcctaatgagtgagctaactcacattaattgcgttgcgctcactgcccgctttccagtcgggaaacctgtcgtgccagctgcattaatgaatcggccaacgcgcggggagaggcggtttgcgtattgggcgctcttccgcttcctcgctcactgactcgctgcgctcggtcgttcggctgcggcgagcggtatcagctcactcaaaggcggtaatacggttatccacagaatcaggggataacgcaggaaagaacatgtgagcaaaaggccagcaaaaggccaggaaccgtaaaaaggccgcgttgctggcgtttttccataggctccgcccccctgacgagcatcacaaaaatcgacgctcaagtcagaggtggcgaaacccgacaggactataaagataccaggcgtttccccctggaagctccctcgtgcgctctcctgttccgaccctgccgcttaccggatacctgtccgcctttctcccttcgggaagcgtggcgctttctcaatgctcacgctgtaggtatctcagttcggtgtaggtcgttcgctccaagctgggctgtgtgcacgaaccccccgttcagcccgaccgctgcgccttatccggtaactatcgtcttgagtccaacccggtaagacacgacttatcgccactggcagcagccactggtaacaggattagcagagcgaggtatgtaggcggtgctacagagttcttgaagtggtggcctaactacggctacactagaaggacagtatttggtatctgcgctctgctgaagccagttaccttcggaaaaagagttggtagctcttgatccggcaaacaaaccaccgctggtagcggtggtttttttgtttgcaagcagcagattacgcgcagaaaaaaaggatctcaagaagatcctttgatcttttctacggggtctgacgctcagtggaacgaaaactcacgttaagggattttggtcatgagattatcaaaaaggatcttcacctagatccttttaaattaaaaatgaagttttaaatcaatctaaagtatatatgagtaaacttggtctgacagttaccaatgcttaatcagtgaggcacctatctcagcgatctgtctatttcgttcatccatagttgcctgactccccgtcgtgtagataactacgatacgggagggcttaccatctggccccagtgctgcaatgataccgcgagacccacgctcaccggctccagatttatcagcaataaaccagccagccggaagggccgagcgcagaagtggtcctgcaactttatccgcctccatccagtctattaattgttgccgggaagctagagtaagtagttcgccagttaatagtttgcgcaacgttgttgccattgctacaggcatcgtggtgtcacgctcgtcgtttggtatggcttcattcagctccggttcccaacgatcaaggcgagttacatgatcccccatgttgtgcaaaaaagcggttagctccttcggtcctccgatcgttgtcagaagtaagttggccgcagtgttatcactcatggttatggcagcactgcataattctcttactgtcatgccatccgtaagatgcttttctgtgactggtgagtactcaaccaagtcattctgagaatagtgtatgcggcgaccgagttgctc

SEQ ID NO: 29 - DNA, 6690 bp, synthetic construct
  source 1..6690: mol_type = other DNA
gacggatcgggagatctcccgatcccctatggtgcactctcagtacaatctgctctgatgccgcatagttaagccagtatctgctccctgcttgtgtgttggaggtcgctgagtagtgcgcgagcaaaatttaagctacaacaaggcaaggcttgaccgacaattgcatgaagaatctgcttagggttaggcgttttgcgctgcttcgcgatgtacgggccagatatacgcgttgacattgattattgactagttattaatagtaatcaattacggggtcattagttcatagcccatatatggagttccgcgttacataacttacggtaaatggcccgcctggctgaccgcccaacgacccccgcccattgacgtcaataatgacgtatgttcccatagtaacgccaatagggactttccattgacgtcaatgggtggagtatttacggtaaactgcccacttggcagtacatcaagtgtatcatatgccaagtacgccccctattgacgtcaatgacggtaaatggcccgcctggcattatgcccagtacatgaccttatgggactttcctacttggcagtacatctacgtattagtcatcgctattaccatggtgatgcggttttggcagtacatcaatgggcgtggatagcggtttgactcacggggatttccaagtctccaccccattgacgtcaatgggagtttgttttggcaccaaaatcaacgggactttccaaaatgtcgtaacaactccgccccattgacgcaaatgggcggtaggcgtgtacggtgggaggtctatataagcagagctctctggctaactagagaacccactgcttactggcttatcgaaattaatacgactcactatagggagacccaagctggctagcgtttaaacttaagcttggtaccgagctcggatccgccaccatgggcaaacggacagccgacggaagcgagttcgagtcaccgaaaaagaagcgaaaagttggctccggaatggccttcctgttttctcccaaggcccgggcctttagcgacgagtccctggagtcttatctgctgagagtggtgagcgagaatttctttgatagctacgagggcctgtccctggccatcagggaggagctgcacgagctggactttgaggcacacggagcattcccagtggacctgaagcggctgaacgtgtaccacgccaagcacaactctcacttcagaatgagagccctgggactgctggagaccctgctggacctgccccggtatgagctgcagaagctggccctgctgaagagcgatatcaagtttaacagctccgtggccctgtacaacaatggcgtggacatccctctgaggttcatcaggcaccacgcagaggaggcagtggattctatcccagtgtgcagccagtgtctggccgaggaggcctacatcaagcagtcctggcacatcaagtgggtgaatgcctgcaccaagcaccagtgtgccctgctgcacaactgccccgagtgttacgcccctatcaactatatcgagaatgagtccatcacacactgctcttgtggctttgagctgagctgcgcctctaccagccccgtgaatacactgtccatcgagcacctgaacaagctgctggacaagggcgagaggaacgattccaatcctctgtttaacaatatgaccctgacagagaggttcgccgccctgctgtggtatcaggagcggtactctcagaccgacaacttctgcctgaatgatgccgtgaactactttagcaagtggcctgccgtgttcaatacagagctggacgagctgtccaagaacgccgagatgaagctgatcgatctgtttaacaagaccgagttcaagtttatcttcggcgacgccatcctggcctgtccaagcacacagaagcagtccgagtctcacttcatctacagggccctgctggactatctggtgaccctggtggagtccaatccaaagacaaagaagcccaacgccgccgatctgctggtgtctgtgctggaggcagccaccctgctgggcacaagcgtggagcaggtgtaccgcctgtatcagaatggcatcctgcagaccgcctttcggcacaagatgaatcagagaatcaacccttacaagggcgccttctttctgaggcacgtgatcgagtataagacatccttcggcaacgataaggcccgcatgtacctgtctgcctggtgagcggccgctcgagtctagagggcccgtttaaacccgctgatcagcctcgactgtgccttctagttgccagccatctgttgtttgcccctcccccgtgccttccttgaccctggaaggtgccactcccactgtcctttcctaataaaatgaggaaattgcatcgcattgtctgagtaggtgtcattctattctggggggtggggtggggcaggacagcaagggggaggattgggaagacaatagcaggcatgctggggatgcggtgggctctatggcttctgaggcggaaagaaccagctggggctctagggggtatccccacgcgccctgtagcggcgcattaagcgcggcgggtgtggtggttacgcgcagcgtgaccgctacacttgccagcgccctagcgcccgctcctttcgctttcttcccttcctttctcgccacgttcgccggctttccccgtcaagctctaaatcgggggctccctttagggttccgatttagtgctttacggcacctcgaccccaaaaaacttgattagggtgatggttcacgtagtgggccatcgccctgatagacggtttttcgccctttgacgttggagtccacgttctttaatagtggactcttgttccaaactggaacaacactcaaccctatctcggtctattcttttgatttataagggattttgccgatttcggcctattggttaaaaaatgagctgatttaacaaaaatttaacgcgaattaattctgtggaatgtgtgtcagttagggtgtggaaagtccccaggctccccagcaggcagaagtatgcaaagcatgcatctcaattagtcagcaaccaggtgtggaaagtccccaggctccccagcaggcagaagtatgcaaagcatgcatctcaattagtcagcaaccatagtcccgcccctaactccgcccatcccgcccctaactccgcccagttccgcccattctccgccccatggctgactaattttttttatttatgcagaggccgaggccgcctctgcctctgagctattccagaagtagtgaggaggcttttttggaggcctaggcttttgcaaaaagctcccgggagcttgtatatccattttcggatctgatcaagagacaggatgaggatcgtttcgcatgattgaacaagatggattgcacgcaggttctccggccgcttgggtggagaggctattcggctatgactgggcacaacagacaatcggctgctctgatgccgccgtgttccggctgtcagcgcaggggcgcccggttctttttgtcaagaccgacctgtccggtgccctgaatgaactgcaggacgaggcagcgcggctatcgtggctggccacgacgggcgttccttgcgcagctgtgctcgacgttgtcactgaagcgggaagggactggctgctattgggcgaagtgccggggcaggatctcctgtcatctcaccttgctcctgccgagaaagtatccatcatggctgatgcaatgcggcggctgcatacgcttgatccggctacctgcccattcgaccaccaagcgaaacatcgcatcgagcgagcacgtactcggatggaagccggtcttgtcgatcaggatgatctggacgaagagcatcaggggctcgcgccagccgaactgttcgccaggctcaaggcgcgcatgcccgacggcgaggatctcgtcgtgacccatggcgatgcctgcttgccgaatatcatggtggaaaatggccgcttttctggattcatcgactgtggccggctgggtgtggcggaccgctatcaggacatagcgttggctacccgtgatattgctgaagagcttggcggcgaatgggctgaccgcttcctcgtgctttacggtatcgccgctcccgattcgcagcgcatcgccttctatcgccttcttgacgagttcttctgagcgggactctggggttcgaaatgaccgaccaagcgacgcccaacctgccatcacgagatttcgattccaccgccgccttctatgaaaggttgggcttcggaatcgttttccgggacgccggctggatgatcctccagcgcggggatctcatgctggagttcttcgcccaccccaacttgtttattgcagcttataatggttacaaataaagcaatagcatcacaaatttcacaaataaagcatttttttcactgcattctagttgtggtttgtccaaactcatcaatgtatcttatcatgtctgtataccgtcgacctctagctagagcttggcgtaatcatggtcatagctgtttcctgtgtgaaattgttatccgctcacaattccacacaacatacgagccggaagcataaagtgtaaagcctggggtgcctaatgagtgagctaactcacattaattgcgttgcgctcactgcccgctttccagtcgggaaacctgtcgtgccagctgcattaatgaatcggccaacgcgcggggagaggcggtttgcgtattgggcgctcttccgcttcctcgctcactgactcgctgcgctcggtcgttcggctgcggcgagcggtatcagctcactcaaaggcggtaatacggttatccacagaatcaggggataacgcaggaaagaacatgtgagcaaaaggccagcaaaaggccaggaaccgtaaaaaggccgcgttgctggcgtttttccataggctccgcccccctgacgagcatcacaaaaatcgacgctcaagtcagaggtggcgaaacccgacaggactataaagataccaggcgtttccccctggaagctccctcgtgcgctctcctgttccgaccctgccgcttaccggatacctgtccgcctttctcccttcgggaagcgtggcgctttctcatagctcacgctgtaggtatctcagttcggtgtaggtcgttcgctccaagctgggctgtgtgcacgaaccccccgttcagcccgaccgctgcgccttatccggtaactatcgtcttgagtccaacccggtaagacacgacttatcgccactggcagcagccactggtaacaggattagcagagcgaggtatgtaggcggtgctacagagttcttgaagtggtggcctaactacggctacactagaagaacagtatttggtatctgcgctctgctgaagccagttaccttcggaaaaagagttggtagctcttgatccggcaaacaaaccaccgctggtagcggtttttttgtttgcaagcagcagattacgcgcagaaaaaaaggatctcaagaagatcctttgatcttttctacggggtctgacgctcagtggaacgaaaactcacgttaagggattttggtcatgagattatcaaaaaggatcttcacctagatccttttaaattaaaaatgaagttttaaatcaatctaaagtatatatgagtaaacttggtctgacagttaccaatgcttaatcagtgaggcacctatctcagcgatctgtctatttcgttcatccatagttgcctgactccccgtcgtgtagataactacgatacgggagggcttaccatctggccccagtgctgcaatgataccgcgagacccacgctcaccggctccagatttatcagcaataaaccagccagccggaagggccgagcgcagaagtggtcctgcaactttatccgcctccatccagtctattaattgttgccgggaagctagagtaagtagttcgccagttaatagtttgcgcaacgttgttgccattgctacaggcatcgtggtgtcacgctcgtcgtttggtatggcttcattcagctccggttcccaacgatcaaggcgagttacatgatcccccatgttgtgcaaaaaagcggttagctccttcggtcctccgatcgttgtcagaagtaagttggccgcagtgttatcactcatggttatggcagcactgcataattctcttactgtcatgccatccgtaagatgcttttctgtgactggtgagtactcaaccaagtcattctgagaatagtgtatgcggcgaccgagttgctcttgcccggcgtcaatacgggataataccgcgccacatagcagaactttaaaagtgctcatcattggaaaacgttcttcggggcgaaaactctcaaggatcttaccgctgttgagatccagttcgatgtaacccactcgtgcacccaactgatcttcagcatcttttactttcaccagcgtttctgggtgagcaaaaacaggaaggcaaaatgccgcaaaaaagggaataagggcgacacggaaatgttgaatactcatactcttcctttttcaatattattgaagcatttatcagggttattgtctcatgagcggatacatatttgaatgtatttagaaaaataaacaaataggggttccgcgcacatttccccgaaaagtgccacctgacgtc

SEQ ID NO: 30 - DNA, 7548 bp, synthetic construct
  source 1..7548: mol_type = other DNA
gacggatcgggagatctcccgatcccctatggtgcactctcagtacaatctgctctgatgccgcatagttaagccagtatctgctccctgcttgtgtgttggaggtcgctgagtagtgcgcgagcaaaatttaagctacaacaaggcaaggcttgaccgacaattgcatgaagaatctgcttagggttaggcgttttgcgctgcttcgcgatgtacgggccagatatacgcgttgacattgattattgactagttattaatagtaatcaattacggggtcattagttcatagcccatatatggagttccgcgttacataacttacggtaaatggcccgcctggctgaccgcccaacgacccccgcccattgacgtcaataatgacgtatgttcccatagtaacgccaatagggactttccattgacgtcaatgggtggagtatttacggtaaactgcccacttggcagtacatcaagtgtatcatatgccaagtacgccccctattgacgtcaatgacggtaaatggcccgcctggcattatgcccagtacatgaccttatgggactttcctacttggcagtacatctacgtattagtcatcgctattaccatggtgatgcggttttggcagtacatcaatgggcgtggatagcggtttgactcacggggatttccaagtctccaccccattgacgtcaatgggagtttgttttggcaccaaaatcaacgggactttccaaaatgtcgtaacaactccgccccattgacgcaaatgggcggtaggcgtgtacggtgggaggtctatataagcagagctctctggctaactagagaacccactgcttactggcttatcgaaattaatacgactcactatagggagacccaagctggctagcgtttaaacttaagcttggtaccgagctcggatccgccaccatgggcaaacggacagccgacggaagcgagttcgagtcaccgaaaaagaagcgaaaagttggctccggaatgcacctgaaggagctgctggagatcaccgacaccacagagagggatcgctccctgcggagagccttctctccctacaccgccatgatcgacatcacaggctccgaggccgtggccctgatcatcctgctgaatctgacatatcgcaagaaccaggtggacgatctgctggacaagaagctggccaagcaggccctgaagagcgaggatcacatcaacaagtgcatcaaggagatcgcctggtttcacacccacaatctgaagtacccagatatccgggtgtccaagcagaacctggccgtggagccccctacactgcactcttatgtgctgagctccgccaattaccccaaggcctatggctggagccacaattccgccaaggtgaactttgccaagctgttcgtgagctactttaagtggcagaaccaggtgtcctggctggcccaggtgctggccaccaatagcgacaactggaagtctgccttcacaagcctgggcctgtccgtgaaggccttcaagagcctgtgcgtgaccgtgaagaatagcctgcctgaggaggccatcccagactccgtggataggtattctcgccagatcagaatgccataccacgacggctatctggccgtgacccccgtgatcagccacgtggtgcagtccaagatccagcaggccgccatcgataagcgggccagattctccaacgtggagtttacacgcccagcagccgtgtctatgctggccgccagcctgggaggcgtgatcaatgtgctgaactacccaccctatatcagaagcaagtaccacggcctgtctaatagcagggccttcaagctgaacaatggccagaccgtgtttaacgtggaggccctgctgaagcctgagctgatcaaggccctggagggcatcatcttctccaacaatgccctggccctgaagcagaggcgccagcagaaggtgaagaatatcaaggagctgcgcaacacactgctggagtggttctctccagtgtttgagtggcggctggacgccatcgagaatggctacgatctggagcagctggagtccgcctctgagagactggagtataagatcctgtccctgcccgacaatgagctgccttctctgaccatcccactgttcagactgctgaacgagatgctgggcggcgtgagcatgacacagaggtacgcctttcaccccaagctgatgtcccctctgaaggccgccctgcagtggctgctggtgaatctgaccgaccagaagcacgtgctgatcgaggaggacgatgagcactacagatatctgcacctgtccggcatcagggtgtttgatgcccaggccctgtctaacccatactgctctggcatccccagcctgacagccgtgtggggaatgatccactcttatcagaggaagctgaatgaggccctgggcaccaacgtgcggttcaccagcttcagctggttcatcagaaactacagcgccgtggcaggcaagaagctgcccgagctgagcctgcagggagcacagcagtccagactgaagaggcctggcatcatcgacggcaagtactgtgacctggtgttcgatctgatcatccacatcgatggctatgaggacgatctgcaggccgtggacagcaagcctgatatcctgaaggcccacttcccatccaattttgcaggaggcgtgatgcaccagccagagctgaactctaatatcaactggtgctgtctgtatagcaatgagaaccagctgtttgagaagctgcggagactgcccctgtccggctgctgggtcatgcctaccgagcacaagatccaggacctggatgagctgctgctgctgctgaactctgacagcaagctgtccccttctatgatgggctacatgctgctgaccgagccaatggcccgcgtgggcagcctggagcggctgcactgttacgccgagcctgccatcggcgtggtgaagtatgaggccgccacatctgtgaggctgaagggcatcggcaattatttcaacagcgccttttggatgctggatgcccaggagaagttcatgctgatgaagaaggtgtgagcggccgctcgagtctagagggcccgtttaaacccgctgatcagcctcgactgtgccttctagttgccagccatctgttgtttgcccctcccccgtgccttccttgaccctggaaggtgccactcccactgtcctttcctaataaaatgaggaaattgcatcgcattgtctgagtaggtgtcattctattctggggggtggggtggggcaggacagcaagggggaggattgggaagacaatagcaggcatgctggggatgcggtgggctctatggcttctgaggcggaaagaaccagctggggctctagggggtatccccacgcgccctgtagcggcgcattaagcgcggcgggtgtggtggttacgcgcagcgtgaccgctacacttgccagcgccctagcgcccgctcctttcgctttcttcccttcctttctcgccacgttcgccggctttccccgtcaagctctaaatcgggggctccctttagggttccgatttagtgctttacggcacctcgaccccaaaaaacttgattagggtgatggttcacgtagtgggccatcgccctgatagacggtttttcgccctttgacgttggagtccacgttctttaatagtggactcttgttccaaactggaacaacactcaaccctatctcggtctattcttttgatttataagggattttgccgatttcggcctattggttaaaaaatgagctgatttaacaaaaatttaacgcgaattaattctgtggaatgtgtgtcagttagggtgtggaaagtccccaggctccccagcaggcagaagtatgcaaagcatgcatctcaattagtcagcaaccaggtgtggaaagtccccaggctccccagcaggcagaagtatgcaaagcatgcatctcaattagtcagcaaccatagtcccgcccctaactccgcccatcccgcccctaactccgcccagttccgcccattctccgccccatggctgactaattttttttatttatgcagaggccgaggccgcctctgcctctgagctattccagaagtagtgaggaggcttttttggaggcctaggcttttgcaaaaagctcccgggagcttgtatatccattttcggatctgatcaagagacaggatgaggatcgtttcgcatgattgaacaagatggattgcacgcaggttctccggccgcttgggtggagaggctattcggctatgactgggcacaacagacaatcggctgctctgatgccgccgtgttccggctgtcagcgcaggggcgcccggttctttttgtcaagaccgacctgtccggtgccctgaatgaactgcaggacgaggcagcgcggctatcgtggctggccacgacgggcgttccttgcgcagctgtgctcgacgttgtcactgaagcgggaagggactggctgctattgggcgaagtgccggggcaggatctcctgtcatctcaccttgctcctgccgagaaagtatccatcatggctgatgcaatgcggcggctgcatacgcttgatccggctacctgcccattcgaccaccaagcgaaacatcgcatcgagcgagcacgtactcggatggaagccggtcttgtcgatcaggatgatctggacgaagagcatcaggggctcgcgccagccgaactgttcgccaggctcaaggcgcgcatgcccgacggcgaggatctcgtcgtgacccatggcgatgcctgcttgccgaatatcatggtggaaaatggccgcttttctggattcatcgactgtggccggctgggtgtggcggaccgctatcaggacatagcgttggctacccgtgatattgctgaagagcttggcggcgaatgggctgaccgcttcctcgtgctttacggtatcgccgctcccgattcgcagcgcatcgccttctatcgccttcttgacgagttcttctgagcgggactctggggttcgaaatgaccgaccaagcgacgcccaacctgccatcacgagatttcgattccaccgccgccttctatgaaaggttgggcttcggaatcgttttccgggacgccggctggatgatcctccagcgcggggatctcatgctggagttcttcgcccaccccaacttgtttattgcagcttataatggttacaaataaagcaatagcatcacaaatttcacaaataaagcatttttttcactgcattctagttgtggtttgtccaaactcatcaatgtatcttatcatgtctgtataccgtcgacctctagctagagcttggcgtaatcatggtcatagctgtttcctgtgtgaaattgttatccgctcacaattccacacaacatacgagccggaagcataaagtgtaaagcctggggtgcctaatgagtgagctaactcacattaattgcgttgcgctcactgcccgctttccagtcgggaaacctgtcgtgccagctgcattaatgaatcggccaacgcgcggggagaggcggtttgcgtattgggcgctcttccgcttcctcgctcactgactcgctgcgctcggtcgttcggctgcggcgagcggtatcagctcactcaaaggcggtaatacggttatccacagaatcaggggataacgcaggaaagaacatgtgagcaaaaggccagcaaaaggccaggaaccgtaaaaaggccgcgttgctggcgtttttccataggctccgcccccctgacgagcatcacaaaaatcgacgctcaagtcagaggtggcgaaacccgacaggactataaagataccaggcgtttccccctggaagctccctcgtgcgctctcctgttccgaccctgccgcttaccggatacctgtccgcctttctcccttcgggaagcgtggcgctttctcatagctcacgctgtaggtatctcagttcggtgtaggtcgttcgctccaagctgggctgtgtgcacgaaccccccgttcagcccgaccgctgcgccttatccggtaactatcgtcttgagtccaacccggtaagacacgacttatcgccactggcagcagccactggtaacaggattagcagagcgaggtatgtaggcggtgctacagagttcttgaagtggtggcctaactacggctacactagaagaacagtatttggtatctgcgctctgctgaagccagttaccttcggaaaaagagttggtagctcttgatccggcaaacaaaccaccgctggtagcggtttttttgtttgcaagcagcagattacgcgcagaaaaaaaggatctcaagaagatcctttgatcttttctacggggtctgacgctcagtggaacgaaaactcacgttaagggattttggtcatgagattatcaaaaaggatcttcacctagatccttttaaattaaaaatgaagttttaaatcaatctaaagtatatatgagtaaacttggtctgacagttaccaatgcttaatcagtgaggcacctatctcagcgatctgtctatttcgttcatccatagttgcctgactccccgtcgtgtagataactacgatacgggagggcttaccatctggccccagtgctgcaatgataccgcgagacccacgctcaccggctccagatttatcagcaataaaccagccagccggaagggccgagcgcagaagtggtcctgcaactttatccgcctccatccagtctattaattgttgccgggaagctagagtaagtagttcgccagttaatagtttgcgcaacgttgttgccattgctacaggcatcgtggtgtcacgctcgtcgtttggtatggcttcattcagctccggttcccaacgatcaaggcgagttacatgatcccccatgttgtgcaaaaaagcggttagctccttcggtcctccgatcgttgtcagaagtaagttggccgcagtgttatcactcatggttatggcagcactgcataattctcttactgtcatgccatccgtaagatgcttttctgtgactggtgagtactcaaccaagtcattctgagaatagtgtatgcggcgaccgagttgctcttgcccggcgtcaatacgggataataccgcgccacatagcagaactttaaaagtgctcatcattggaaaacgttcttcggggcgaaaactctcaaggatcttaccgctgttgagatccagttcgatgtaacccactcgtgcacccaactgatcttcagcatcttttactttcaccagcgtttctgggtgagcaaaaacaggaaggcaaaatgccgcaaaaaagggaataagggcgacacggaaatgttgaatactcatactcttcctttttcaatattattgaagcatttatcagggttattgtctcatgagcggatacatatttgaatgtatttagaaaaataaacaaataggggttccgcgcacatttccccgaaaagtgccacctgacgtc

SEQ ID NO: 31 - DNA, 6513 bp, synthetic construct
  source 1..6513: mol_type = other DNA
gacggatcgggagatctcccgatcccctatggtgcactctcagtacaatctgctctgatgccgcatagttaagccagtatctgctccctgcttgtgtgttggaggtcgctgagtagtgcgcgagcaaaatttaagctacaacaaggcaaggcttgaccgacaattgcatgaagaatctgcttagggttaggcgttttgcgctgcttcgcgatgtacgggccagatatacgcgttgacattgattattgactagttattaatagtaatcaattacggggtcattagttcatagcccatatatggagttccgcgttacataacttacggtaaatggcccgcctggctgaccgcccaacgacccccgcccattgacgtcaataatgacgtatgttcccatagtaacgccaatagggactttccattgacgtcaatgggtggagtatttacggtaaactgcccacttggcagtacatcaagtgtatcatatgccaagtacgccccctattgacgtcaatgacggtaaatggcccgcctggcattatgcccagtacatgaccttatgggactttcctacttggcagtacatctacgtattagtcatcgctattaccatggtgatgcggttttggcagtacatcaatgggcgtggatagcggtttgactcacggggatttccaagtctccaccccattgacgtcaatgggagtttgttttggcaccaaaatcaacgggactttccaaaatgtcgtaacaactccgccccattgacgcaaatgggcggtaggcgtgtacggtgggaggtctatataagcagagctctctggctaactagagaacccactgcttactggcttatcgaaattaatacgactcactatagggagacccaagctggctagcgtttaaacttaagcttggtaccgagctcggatccgccaccatgggcaaacggacagccgacggaagcgagttcgagtcaccgaaaaagaagcgaaaagttggctccggaatggagctgtgcaacatcctgaagtacgacaggtctctgtatcccggcaaggccgtgttcttttacaagaccgccgacagcgattttgtgccactggaggccgatatcaacaagatcaggggaccaaagagcggcttcaccgaggcctttacacctcagttctctccaaagaatatcagccctcaggacctgacccacaacaatatcctgacactggaggagtgctatgtgccccctaacgtggagcacatcttctgtaggttttctctgcgcgtgcaggccaatagcctggtgcccagcggctgctccgatcctgaggtgttttccctgctgaaggagctggccgagaccttcaaggagtgcggaggatacaaggagctggccgtgcggtattgtagaaacatcctgatcggcacatggctgtggcggaaccagaataccggcaatacacagatcgagatcaagacctctaagggcagctgttacctgatcgacaacacaagaaagctggcctgggagagcaagtgggcctccgacgatctgaaggtgctggaggagctgtccaacgagatcgagtctgccctgaccgaccctaacgtgttctggagcgccgatatcacagccaagatcgaggcctccttctgccaggaaatctacccatctcagatcctgaacgacaaggtgaagcagggcgaggcctccaagcagtttgtgaaggccaagtgtgccgatggccggtatgccgtgtccttcaattctgtgaagatcggcgccgccctgcagagcatcgacgattggtgggacgaggatgcctccaagaggctgcgcgtgcacgagttcggagcagacaaggagatcggagtggcacggagaccacccgatagcgagcagaacttttactccatcttcaagaataccgagtggtatctgtccgccctgaagaattgtatcacaaacaagaatgagaagatcgatcccgccatctactatctgttttctgtgctgatcaagggcggcatgttccagaagaaggccgaggccaagaaggcctgagcggccgctcgagtctagagggcccgtttaaacccgctgatcagcctcgactgtgccttctagttgccagccatctgttgtttgcccctcccccgtgccttccttgaccctggaaggtgccactcccactgtcctttcctaataaaatgaggaaattgcatcgcattgtctgagtaggtgtcattctattctggggggtggggtggggcaggacagcaagggggaggattgggaagacaatagcaggcatgctggggatgcggtgggctctatggcttctgaggcggaaagaaccagctggggctctagggggtatccccacgcgccctgtagcggcgcattaagcgcggcgggtgtggtggttacgcgcagcgtgaccgctacacttgccagcgccctagcgcccgctcctttcgctttcttcccttcctttctcgccacgttcgccggctttccccgtcaagctctaaatcgggggctccctttagggttccgatttagtgctttacggcacctcgaccccaaaaaacttgattagggtgatggttcacgtagtgggccatcgccctgatagacggtttttcgccctttgacgttggagtccacgttctttaatagtggactcttgttccaaactggaacaacactcaaccctatctcggtctattcttttgatttataagggattttgccgatttcggcctattggttaaaaaatgagctgatttaacaaaaatttaacgcgaattaattctgtggaatgtgtgtcagttagggtgtggaaagtccccaggctccccagcaggcagaagtatgcaaagcatgcatctcaattagtcagcaaccaggtgtggaaagtccccaggctccccagcaggcagaagtatgcaaagcatgcatctcaattagtcagcaaccatagtcccgcccctaactccgcccatcccgcccctaactccgcccagttccgcccattctccgccccatggctgactaattttttttatttatgcagaggccgaggccgcctctgcctctgagctattccagaagtagtgaggaggcttttttggaggcctaggcttttgcaaaaagctcccgggagcttgtatatccattttcggatctgatcaagagacaggatgaggatcgtttcgcatgattgaacaagatggattgcacgcaggttctccggccgcttgggtggagaggctattcggctatgactgggcacaacagacaatcggctgctctgatgccgccgtgttccggctgtcagcgcaggggcgcccggttctttttgtcaagaccgacctgtccggtgccctgaatgaactgcaggacgaggcagcgcggctatcgtggctggccacgacgggcgttccttgcgcagctgtgctcgacgttgtcactgaagcgggaagggactggctgctattgggcgaagtgccggggcaggatctcctgtcatctcaccttgctcctgccgagaaagtatccatcatggctgatgcaatgcggcggctgcatacgcttgatccggctacctgcccattcgaccaccaagcgaaacatcgcatcgagcgagcacgtactcggatggaagccggtcttgtcgatcaggatgatctggacgaagagcatcaggggctcgcgccagccgaactgttcgccaggctcaaggcgcgcatgcccgacggcgaggatctcgtcgtgacccatggcgatgcctgcttgccgaatatcatggtggaaaatggccgcttttctggattcatcgactgtggccggctgggtgtggcggaccgctatcaggacatagcgttggctacccgtgatattgctgaagagcttggcggcgaatgggctgaccgcttcctcgtgctttacggtatcgccgctcccgattcgcagcgcatcgccttctatcgccttcttgacgagttcttctgagcgggactctggggttcgaaatgaccgaccaagcgacgcccaacctgccatcacgagatttcgattccaccgccgccttctatgaaaggttgggcttcggaatcgttttccgggacgccggctggatgatcctccagcgcggggatctcatgctggagttcttcgcccaccccaacttgtttattgcagcttataatggttacaaataaagcaatagcatcacaaatttcacaaataaagcatttttttcactgcattctagttgtggtttgtccaaactcatcaatgtatcttatcatgtctgtataccgtcgacctctagctagagcttggcgtaatcatggtcatagctgtttcctgtgtgaaattgttatccgctcacaattccacacaacatacgagccggaagcataaagtgtaaagcctggggtgcctaatgagtgagctaactcacattaattgcgttgcgctcactgcccgctttccagtcgggaaacctgtcgtgccagctgcattaatgaatcggccaacgcgcggggagaggcggtttgcgtattgggcgctcttccgcttcctcgctcactgactcgctgcgctcggtcgttcggctgcggcgagcggtatcagctcactcaaaggcggtaatacggttatccacagaatcaggggataacgcaggaaagaacatgtgagcaaaaggccagcaaaaggccaggaaccgtaaaaaggccgcgttgctggcgtttttccataggctccgcccccctgacgagcatcacaaaaatcgacgctcaagtcagaggtggcgaaacccgacaggactataaagataccaggcgtttccccctggaagctccctcgtgcgctctcctgttccgaccctgccgcttaccggatacctgtccgcctttctcccttcgggaagcgtggcgctttctcatagctcacgctgtaggtatctcagttcggtgtaggtcgttcgctccaagctgggctgtgtgcacgaaccccccgttcagcccgaccgctgcgccttatccggtaactatcgtcttgagtccaacccggtaagacacgacttatcgccactggcagcagccactggtaacaggattagcagagcgaggtatgtaggcggtgctacagagttcttgaagtggtggcctaactacggctacactagaagaacagtatttggtatctgcgctctgctgaagccagttaccttcggaaaaagagttggtagctcttgatccggcaaacaaaccaccgctggtagcggtttttttgtttgcaagcagcagattacgcgcagaaaaaaaggatctcaagaagatcctttgatcttttctacggggtctgacgctcagtggaacgaaaactcacgttaagggattttggtcatgagattatcaaaaaggatcttcacctagatccttttaaattaaaaatgaagttttaaatcaatctaaagtatatatgagtaaacttggtctgacagttaccaatgcttaatcagtgaggcacctatctcagcgatctgtctatttcgttcatccatagttgcctgactccccgtcgtgtagataactacgatacgggagggcttaccatctggccccagtgctgcaatgataccgcgagacccacgctcaccggctccagatttatcagcaataaaccagccagccggaagggccgagcgcagaagtggtcctgcaactttatccgcctccatccagtctattaattgttgccgggaagctagagtaagtagttcgccagttaatagtttgcgcaacgttgttgccattgctacaggcatcgtggtgtcacgctcgtcgtttggtatggcttcattcagctccggttcccaacgatcaaggcgagttacatgatcccccatgttgtgcaaaaaagcggttagctccttcggtcctccgatcgttgtcagaagtaagttggccgcagtgttatcactcatggttatggcagcactgcataattctcttactgtcatgccatccgtaagatgcttttctgtgactggtgagtactcaaccaagtcattctgagaatagtgtatgcggcgaccgagttgctcttgcccggcgtcaatacgggataataccgcgccacatagcagaactttaaaagtgctcatcattggaaaacgttcttcggggcgaaaactctcaaggatcttaccgctgttgagatccagttcgatgtaacccactcgtgcacccaactgatcttcagcatcttttactttcaccagcgtttctgggtgagcaaaaacaggaaggcaaaatgccgcaaaaaagggaataagggcgacacggaaatgttgaatactcatactcttcctttttcaatattattgaagcatttatcagggttattgtctcatgagcggatacatatttgaatgtatttagaaaaataaacaaataggggttccgcgcacatttccccgaaaagtgccacctgacgtc

SEQ ID NO: 32 - DNA, 6072 bp, synthetic construct
  source 1..6072: mol_type = other DNA
gacggatcgggagatctcccgatcccctatggtgcactctcagtacaatctgctctgatgccgcatagttaagccagtatctgctccctgcttgtgtgttggaggtcgctgagtagtgcgcgagcaaaatttaagctacaacaaggcaaggcttgaccgacaattgcatgaagaatctgcttagggttaggcgttttgcgctgcttcgcgatgtacgggccagatatacgcgttgacattgattattgactagttattaatagtaatcaattacggggtcattagttcatagcccatatatggagttccgcgttacataacttacggtaaatggcccgcctggctgaccgcccaacgacccccgcccattgacgtcaataatgacgtatgttcccatagtaacgccaatagggactttccattgacgtcaatgggtggagtatttacggtaaactgcccacttggcagtacatcaagtgtatcatatgccaagtacgccccctattgacgtcaatgacggtaaatggcccgcctggcattatgcccagtacatgaccttatgggactttcctacttggcagtacatctacgtattagtcatcgctattaccatggtgatgcggttttggcagtacatcaatgggcgtggatagcggtttgactcacggggatttccaagtctccaccccattgacgtcaatgggagtttgttttggcaccaaaatcaacgggactttccaaaatgtcgtaacaactccgccccattgacgcaaatgggcggtaggcgtgtacggtgggaggtctatataagcagagctctctggctaactagagaacccactgcttactggcttatcgaaattaatacgactcactatagggagacccaagctggctagcgtttaaacttaagcttggtaccgagctcggatccgccaccatgggcaaacggacagccgacggaagcgagttcgagtcaccgaaaaagaagcgaaaagttggctccggaatgcagagatactactttaccgtgcatttcctgcctaaacaagccaatctggccctgctgacaggcagatgcatcagcatcatgcacggctttatcctgaagcacaacatcgagggaatgggcgttaccttcccagcctggtccgacagcagcatcggcaacgaaattgccttcgtgtacaccgacaaggaaatcctcaacacactgaaggaccaggcctacttcgtggatatgcaggattgcggcttcttcaaggtctcccaagtgctggctgtgcccgattcttgcgaggaagtgcggttcatccggaaccaggccgtggccaaaatcttcaccggagagagcagaagaaggctgaaaagactgcagaagagagccctggccagaggcgaagatttcaaccccaagaagatcgaggcccctcgggaaatcgatatcttccacagagtggccatgaccagcaagagctctcaggaggactacatcctgcacatccagaaacaggacgtggactgtcaggctgagccttactttagcaattacggcctggccagcaacgagaagttcaagggaacagtgcctgacctgagccccagcatcgacagaaactgagcggccgctcgagtctagagggcccgtttaaacccgctgatcagcctcgactgtgccttctagttgccagccatctgttgtttgcccctcccccgtgccttccttgaccctggaaggtgccactcccactgtcctttcctaataaaatgaggaaattgcatcgcattgtctgagtaggtgtcattctattctggggggtggggtggggcaggacagcaagggggaggattgggaagacaatagcaggcatgctggggatgcggtgggctctatggcttctgaggcggaaagaaccagctggggctctagggggtatccccacgcgccctgtagcggcgcattaagcgcggcgggtgtggtggttacgcgcagcgtgaccgctacacttgccagcgccctagcgcccgctcctttcgctttcttcccttcctttctcgccacgttcgccggctttccccgtcaagctctaaatcgggggctccctttagggttccgatttagtgctttacggcacctcgaccccaaaaaacttgattagggtgatggttcacgtagtgggccatcgccctgatagacggtttttcgccctttgacgttggagtccacgttctttaatagtggactcttgttccaaactggaacaacactcaaccctatctcggtctattcttttgatttataagggattttgccgatttcggcctattggttaaaaaatgagctgatttaacaaaaatttaacgcgaattaattctgtggaatgtgtgtcagttagggtgtggaaagtccccaggctccccagcaggcagaagtatgcaaagcatgcatctcaattagtcagcaaccaggtgtggaaagtccccaggctccccagcaggcagaagtatgcaaagcatgcatctcaattagtcagcaaccatagtcccgcccctaactccgcccatcccgcccctaactccgcccagttccgcccattctccgccccatggctgactaattttttttatttatgcagaggccgaggccgcctctgcctctgagctattccagaagtagtgaggaggcttttttggaggcctaggcttttgcaaaaagctcccgggagcttgtatatccattttcggatctgatcaagagacaggatgaggatcgtttcgcatgattgaacaagatggattgcacgcaggttctccggccgcttgggtggagaggctattcggctatgactgggcacaacagacaatcggctgctctgatgccgccgtgttccggctgtcagcgcaggggcgcccggttctttttgtcaagaccgacctgtccggtgccctgaatgaactgcaggacgaggcagcgcggctatcgtggctggccacgacgggcgttccttgcgcagctgtgctcgacgttgtcactgaagcgggaagggactggctgctattgggcgaagtgccggggcaggatctcctgtcatctcaccttgctcctgccgagaaagtatccatcatggctgatgcaatgcggcggctgcatacgcttgatccggctacctgcccattcgaccaccaagcgaaacatcgcatcgagcgagcacgtactcggatggaagccggtcttgtcgatcaggatgatctggacgaagagcatcaggggctcgcgccagccgaactgttcgccaggctcaaggcgcgcatgcccgacggcgaggatctcgtcgtgacccatggcgatgcctgcttgccgaatatcatggtggaaaatggccgcttttctggattcatcgactgtggccggctgggtgtggcggaccgctatcaggacatagcgttggctacccgtgatattgctgaagagcttggcggcgaatgggctgaccgcttcctcgtgctttacggtatcgccgctcccgattcgcagcgcatcgccttctatcgccttcttgacgagttcttctgagcgggactctggggttcgaaatgaccgaccaagcgacgcccaacctgccatcacgagatttcgattccaccgccgccttctatgaaaggttgggcttcggaatcgttttccgggacgccggctggatgatcctccagcgcggggatctcatgctggagttcttcgcccaccccaacttgtttattgcagcttataatggttacaaataaagcaatagcatcacaaatttcacaaataaagcatttttttcactgcattctagttgtggtttgtccaaactcatcaatgtatcttatcatgtctgtataccgtcgacctctagctagagcttggcgtaatcatggtcatagctgtttcctgtgtgaaattgttatccgctcacaattccacacaacatacgagccggaagcataaagtgtaaagcctggggtgcctaatgagtgagctaactcacattaattgcgttgcgctcactgcccgctttccagtcgggaaacctgtcgtgccagctgcattaatgaatcggccaacgcgcggggagaggcggtttgcgtattgggcgctcttccgcttcctcgctcactgactcgctgcgctcggtcgttcggctgcggcgagcggtatcagctcactcaaaggcggtaatacggttatccacagaatcaggggataacgcaggaaagaacatgtgagcaaaaggccagcaaaaggccaggaaccgtaaaaaggccgcgttgctggcgtttttccataggctccgcccccctgacgagcatcacaaaaatcgacgctcaagtcagaggtggcgaaacccgacaggactataaagataccaggcgtttccccctggaagctccctcgtgcgctctcctgttccgaccctgccgcttaccggatacctgtccgcctttctcccttcgggaagcgtggcgctttctcatagctcacgctgtaggtatctcagttcggtgtaggtcgttcgctccaagctgggctgtgtgcacgaaccccccgttcagcccgaccgctgcgccttatccggtaactatcgtcttgagtccaacccggtaagacacgacttatcgccactggcagcagccactggtaacaggattagcagagcgaggtatgtaggcggtgctacagagttcttgaagtggtggcctaactacggctacactagaagaacagtatttggtatctgcgctctgctgaagccagttaccttcggaaaaagagttggtagctcttgatccggcaaacaaaccaccgctggtagcggtttttttgtttgcaagcagcagattacgcgcagaaaaaaaggatctcaagaagatcctttgatcttttctacggggtctgacgctcagtggaacgaaaactcacgttaagggattttggtcatgagattatcaaaaaggatcttcacctagatccttttaaattaaaaatgaagttttaaatcaatctaaagtatatatgagtaaacttggtctgacagttaccaatgcttaatcagtgaggcacctatctcagcgatctgtctatttcgttcatccatagttgcctgactccccgtcgtgtagataactacgatacgggagggcttaccatctggccccagtgctgcaatgataccgcgagacccacgctcaccggctccagatttatcagcaataaaccagccagccggaagggccgagcgcagaagtggtcctgcaactttatccgcctccatccagtctattaattgttgccgggaagctagagtaagtagttcgccagttaatagtttgcgcaacgttgttgccattgctacaggcatcgtggtgtcacgctcgtcgtttggtatggcttcattcagctccggttcccaacgatcaaggcgagttacatgatcccccatgttgtgcaaaaaagcggttagctccttcggtcctccgatcgttgtcagaagtaagttggccgcagtgttatcactcatggttatggcagcactgcataattctcttactgtcatgccatccgtaagatgcttttctgtgactggtgagtactcaaccaagtcattctgagaatagtgtatgcggcgaccgagttgctcttgcccggcgtcaatacgggataataccgcgccacatagcagaactttaaaagtgctcatcattggaaaacgttcttcggggcgaaaactctcaaggatcttaccgctgttgagatccagttcgatgtaacccactcgtgcacccaactgatcttcagcatcttttactttcaccagcgtttctgggtgagcaaaaacaggaaggcaaaatgccgcaaaaaagggaataagggcgacacggaaatgttgaatactcatactcttcctttttcaatattattgaagcatttatcagggttattgtctcatgagcggatacatatttgaatgtatttagaaaaataaacaaataggggttccgcgcacatttccccgaaaagtgccacctgacgtc

SEQ ID NO: 33 - DNA, 10803 bp, synthetic construct
  source 1..10803: mol_type = other DNA
gacggatcgggagatctcccgatcccctatggtgcactctcagtacaatctgctctgatgccgcatagttaagccagtatctgctccctgcttgtgtgttggaggtcgctgagtagtgcgcgagcaaaatttaagctacaacaaggcaaggcttgaccgacaattgcatgaagaatctgcttagggttaggcgttttgcgctgcttcgcgatgtacgggccagatatacgcgttgacattgattattgactagttattaatagtaatcaattacggggtcattagttcatagcccatatatggagttccgcgttacataacttacggtaaatggcccgcctggctgaccgcccaacgacccccgcccattgacgtcaataatgacgtatgttcccatagtaacgccaatagggactttccattgacgtcaatgggtggagtatttacggtaaactgcccacttggcagtacatcaagtgtatcatatgccaagtacgccccctattgacgtcaatgacggtaaatggcccgcctggcattatgcccagtacatgaccttatgggactttcctacttggcagtacatctacgtattagtcatcgctattaccatggtgatgcggttttggcagtacatcaatgggcgtggatagcggtttgactcacggggatttccaagtctccaccccattgacgtcaatgggagtttgttttggcaccaaaatcaacgggactttccaaaatgtcgtaacaactccgccccattgacgcaaatgggcggtaggcgtgtacggtgggaggtctatataagcagagctctctggctaactagagaacccactgcttactggcttatcgaaattaatacgactcactatagggagacccaagctggctagcgtttaaacttaagcttgccaccatggagctgtgcaacatcctgaagtacgacaggtctctgtatcccggcaaggccgtgttcttttacaagaccgccgacagcgattttgtgccactggaggccgatatcaacaagatcaggggaccaaagagcggcttcaccgaggcctttacacctcagttctctccaaagaatatcagccctcaggacctgacccacaacaatatcctgacactggaggagtgctatgtgccccctaacgtggagcacatcttctgtaggttttctctgcgcgtgcaggccaatagcctggtgcccagcggctgctccgatcctgaggtgttttccctgctgaaggagctggccgagaccttcaaggagtgcggaggatacaaggagctggccgtgcggtattgtagaaacatcctgatcggcacatggctgtggcggaaccagaataccggcaatacacagatcgagatcaagacctctaagggcagctgttacctgatcgacaacacaagaaagctggcctgggagagcaagtgggcctccgacgatctgaaggtgctggaggagctgtccaacgagatcgagtctgccctgaccgaccctaacgtgttctggagcgccgatatcacagccaagatcgaggcctccttctgccaggaaatctacccatctcagatcctgaacgacaaggtgaagcagggcgaggcctccaagcagtttgtgaaggccaagtgtgccgatggccggtatgccgtgtccttcaattctgtgaagatcggcgccgccctgcagagcatcgacgattggtgggacgaggatgcctccaagaggctgcgcgtgcacgagttcggagcagacaaggagatcggagtggcacggagaccacccgatagcgagcagaacttttactccatcttcaagaataccgagtggtatctgtccgccctgaagaattgtatcacaaacaagaatgagaagatcgatcccgccatctactatctgttttctgtgctgatcaagggcggcatgttccagaagaaggccgaggccaagaaggccggctccggaaaaagaaccgccgacggcagcgaattcgagtcacccaagaagaagaggaaagtcgggtcctccgagggaaggggctctctgctgacctgcggcgacgtggaggagaaccctggacccggaatgggccacctgaaggagctgctggagatcaccgacaccacagagagggatcgctccctgcggagagccttctctccctacaccgccatgatcgacatcacaggctccgaggccgtggccctgatcatcctgctgaatctgacatatcgcaagaaccaggtggacgatctgctggacaagaagctggccaagcaggccctgaagagcgaggatcacatcaacaagtgcatcaaggagatcgcctggtttcacacccacaatctgaagtacccagatatccgggtgtccaagcagaacctggccgtggagccccctacactgcactcttatgtgctgagctccgccaattaccccaaggcctatggctggagccacaattccgccaaggtgaactttgccaagctgttcgtgagctactttaagtggcagaaccaggtgtcctggctggcccaggtgctggccaccaatagcgacaactggaagtctgccttcacaagcctgggcctgtccgtgaaggccttcaagagcctgtgcgtgaccgtgaagaatagcctgcctgaggaggccatcccagactccgtggataggtattctcgccagatcagaatgccataccacgacggctatctggccgtgacccccgtgatcagccacgtggtgcagtccaagatccagcaggccgccatcgataagcgggccagattctccaacgtggagtttacacgcccagcagccgtgtctatgctggccgccagcctgggaggcgtgatcaatgtgctgaactacccaccctatatcagaagcaagtaccacggcctgtctaatagcagggccttcaagctgaacaatggccagaccgtgtttaacgtggaggccctgctgaagcctgagctgatcaaggccctggagggcatcatcttctccaacaatgccctggccctgaagcagaggcgccagcagaaggtgaagaatatcaaggagctgcgcaacacactgctggagtggttctctccagtgtttgagtggcggctggacgccatcgagaatggctacgatctggagcagctggagtccgcctctgagagactggagtataagatcctgtccctgcccgacaatgagctgccttctctgaccatcccactgttcagactgctgaacgagatgctgggcggcgtgagcatgacacagaggtacgcctttcaccccaagctgatgtcccctctgaaggccgccctgcagtggctgctggtgaatctgaccgaccagaagcacgtgctgatcgaggaggacgatgagcactacagatatctgcacctgtccggcatcagggtgtttgatgcccaggccctgtctaacccatactgctctggcatccccagcctgacagccgtgtggggaatgatccactcttatcagaggaagctgaatgaggccctgggcaccaacgtgcggttcaccagcttcagctggttcatcagaaactacagcgccgtggcaggcaagaagctgcccgagctgagcctgcagggagcacagcagtccagactgaagaggcctggcatcatcgacggcaagtactgtgacctggtgttcgatctgatcatccacatcgatggctatgaggacgatctgcaggccgtggacagcaagcctgatatcctgaaggcccacttcccatccaattttgcaggaggcgtgatgcaccagccagagctgaactctaatatcaactggtgctgtctgtatagcaatgagaaccagctgtttgagaagctgcggagactgcccctgtccggctgctgggtcatgcctaccgagcacaagatccaggacctggatgagctgctgctgctgctgaactctgacagcaagctgtccccttctatgatgggctacatgctgctgaccgagccaatggcccgcgtgggcagcctggagcggctgcactgttacgccgagcctgccatcggcgtggtgaagtatgaggccgccacatctgtgaggctgaagggcatcggcaattatttcaacagcgccttttggatgctggatgcccaggagaagttcatgctgatgaagaaggtgggaagcggcaagcggactgctgatggcagtgaatttgagtccccaaagaagaagagaaaggtgggctcgagcgagggaaggggctccctgctgacttgtggcgacgtggaggagaaccctggccccagcatgggccagagatactactttaccgtgcatttcctgcctaaacaagccaatctggccctgctgacaggcagatgcatcagcatcatgcacggctttatcctgaagcacaacatcgagggaatgggcgttaccttcccagcctggtccgacagcagcatcggcaacgaaattgccttcgtgtacaccgacaaggaaatcctcaacacactgaaggaccaggcctacttcgtggatatgcaggattgcggcttcttcaaggtctcccaagtgctggctgtgcccgattcttgcgaggaagtgcggttcatccggaaccaggccgtggccaaaatcttcaccggagagagcagaagaaggctgaaaagactgcagaagagagccctggccagaggcgaagatttcaaccccaagaagatcgaggcccctcgggaaatcgatatcttccacagagtggccatgaccagcaagagctctcaggaggactacatcctgcacatccagaaacaggacgtggactgtcaggctgagccttactttagcaattacggcctggccagcaacgagaagttcaagggaacagtgcctgacctgagccccagcatcgacagaaacgggtctggaaagcgcaccgccgatggttccgagttcgaaagccccaaaaaaaagcgcaaggtcggtagctccgagggaagaggctccctgctgacatgtggcgacgtggaagaaaaccctggacctggcaaacggacagccgacggaagcgagttcgagtcaccgaaaaagaagcgaaaagttggctccggaatggccttcctgttttctcccaaggcccgggcctttagcgacgagtccctggagtcttatctgctgagagtggtgagcgagaatttctttgatagctacgagggcctgtccctggccatcagggaggagctgcacgagctggactttgaggcacacggagcattcccagtggacctgaagcggctgaacgtgtaccacgccaagcacaactctcacttcagaatgagagccctgggactgctggagaccctgctggacctgccccggtatgagctgcagaagctggccctgctgaagagcgatatcaagtttaacagctccgtggccctgtacaacaatggcgtggacatccctctgaggttcatcaggcaccacgcagaggaggcagtggattctatcccagtgtgcagccagtgtctggccgaggaggcctacatcaagcagtcctggcacatcaagtgggtgaatgcctgcaccaagcaccagtgtgccctgctgcacaactgccccgagtgttacgcccctatcaactatatcgagaatgagtccatcacacactgctcttgtggctttgagctgagctgcgcctctaccagccccgtgaatacactgtccatcgagcacctgaacaagctgctggacaagggcgagaggaacgattccaatcctctgtttaacaatatgaccctgacagagaggttcgccgccctgctgtggtatcaggagcggtactctcagaccgacaacttctgcctgaatgatgccgtgaactactttagcaagtggcctgccgtgttcaatacagagctggacgagctgtccaagaacgccgagatgaagctgatcgatctgtttaacaagaccgagttcaagtttatcttcggcgacgccatcctggcctgtccaagcacacagaagcagtccgagtctcacttcatctacagggccctgctggactatctggtgaccctggtggagtccaatccaaagacaaagaagcccaacgccgccgatctgctggtgtctgtgctggaggcagccaccctgctgggcacaagcgtggagcaggtgtaccgcctgtatcagaatggcatcctgcagaccgcctttcggcacaagatgaatcagagaatcaacccttacaagggcgccttctttctgaggcacgtgatcgagtataagacatccttcggcaacgataaggcccgcatgtacctgtctgcctggtgagcggccgctcgagtctagagggcccgtttaaacccgctgatcagcctcgactgtgccttctagttgccagccatctgttgtttgcccctcccccgtgccttccttgaccctggaaggtgccactcccactgtcctttcctaataaaatgaggaaattgcatcgcattgtctgagtaggtgtcattctattctggggggtggggtggggcaggacagcaagggggaggattgggaagacaatagcaggcatgctggggatgcggtgggctctatggcttctgaggcggaaagaaccagctggggctctagggggtatccccacgcgccctgtagcggcgcattaagcgcggcgggtgtggtggttacgcgcagcgtgaccgctacacttgccagcgccctagcgcccgctcctttcgctttcttcccttcctttctcgccacgttcgccggctttccccgtcaagctctaaatcgggggctccctttagggttccgatttagtgctttacggcacctcgaccccaaaaaacttgattagggtgatggttcacgtagtgggccatcgccctgatagacggtttttcgccctttgacgttggagtccacgttctttaatagtggactcttgttccaaactggaacaacactcaaccctatctcggtctattcttttgatttataagggattttgccgatttcggcctattggttaaaaaatgagctgatttaacaaaaatttaacgcgaattaattctgtggaatgtgtgtcagttagggtgtggaaagtccccaggctccccagcaggcagaagtatgcaaagcatgcatctcaattagtcagcaaccaggtgtggaaagtccccaggctccccagcaggcagaagtatgcaaagcatgcatctcaattagtcagcaaccatagtcccgcccctaactccgcccatcccgcccctaactccgcccagttccgcccattctccgccccatggctgactaattttttttatttatgcagaggccgaggccgcctctgcctctgagctattccagaagtagtgaggaggcttttttggaggcctaggcttttgcaaaaagctcccgggagcttgtatatccattttcggatctgatcaagagacaggatgaggatcgtttcgcatgattgaacaagatggattgcacgcaggttctccggccgcttgggtggagaggctattcggctatgactgggcacaacagacaatcggctgctctgatgccgccgtgttccggctgtcagcgcaggggcgcccggttctttttgtcaagaccgacctgtccggtgccctgaatgaactgcaggacgaggcagcgcggctatcgtggctggccacgacgggcgttccttgcgcagctgtgctcgacgttgtcactgaagcgggaagggactggctgctattgggcgaagtgccggggcaggatctcctgtcatctcaccttgctcctgccgagaaagtatccatcatggctgatgcaatgcggcggctgcatacgcttgatccggctacctgcccattcgaccaccaagcgaaacatcgcatcgagcgagcacgtactcggatggaagccggtcttgtcgatcaggatgatctggacgaagagcatcaggggctcgcgccagccgaactgttcgccaggctcaaggcgcgcatgcccgacggcgaggatctcgtcgtgacccatggcgatgcctgcttgccgaatatcatggtggaaaatggccgcttttctggattcatcgactgtggccggctgggtgtggcggaccgctatcaggacatagcgttggctacccgtgatattgctgaagagcttggcggcgaatgggctgaccgcttcctcgtgctttacggtatcgccgctcccgattcgcagcgcatcgccttctatcgccttcttgacgagttcttctgagcgggactctggggttcgaaatgaccgaccaagcgacgcccaacctgccatcacgagatttcgattccaccgccgccttctatgaaaggttgggcttcggaatcgttttccgggacgccggctggatgatcctccagcgcggggatctcatgctggagttcttcgcccaccccaacttgtttattgcagcttataatggttacaaataaagcaatagcatcacaaatttcacaaataaagcatttttttcactgcattctagttgtggtttgtccaaactcatcaatgtatcttatcatgtctgtataccgtcgacctctagctagagcttggcgtaatcatggtcatagctgtttcctgtgtgaaattgttatccgctcacaattccacacaacatacgagccggaagcataaagtgtaaagcctggggtgcctaatgagtgagctaactcacattaattgcgttgcgctcactgcccgctttccagtcgggaaacctgtcgtgccagctgcattaatgaatcggccaacgcgcggggagaggcggtttgcgtattgggcgctcttccgcttcctcgctcactgactcgctgcgctcggtcgttcggctgcggcgagcggtatcagctcactcaaaggcggtaatacggttatccacagaatcaggggataacgcaggaaagaacatgtgagcaaaaggccagcaaaaggccaggaaccgtaaaaaggccgcgttgctggcgtttttccataggctccgcccccctgacgagcatcacaaaaatcgacgctcaagtcagaggtggcgaaacccgacaggactataaagataccaggcgtttccccctggaagctccctcgtgcgctctcctgttccgaccctgccgcttaccggatacctgtccgcctttctcccttcgggaagcgtggcgctttctcatagctcacgctgtaggtatctcagttcggtgtaggtcgttcgctccaagctgggctgtgtgcacgaaccccccgttcagcccgaccgctgcgccttatccggtaactatcgtcttgagtccaacccggtaagacacgacttatcgccactggcagcagccactggtaacaggattagcagagcgaggtatgtaggcggtgctacagagttcttgaagtggtggcctaactacggctacactagaagaacagtatttggtatctgcgctctgctgaagccagttaccttcggaaaaagagttggtagctcttgatccggcaaacaaaccaccgctggtagcggtttttttgtttgcaagcagcagattacgcgcagaaaaaaaggatctcaagaagatcctttgatcttttctacggggtctgacgctcagtggaacgaaaactcacgttaagggattttggtcatgagattatcaaaaaggatcttcacctagatccttttaaattaaaaatgaagttttaaatcaatctaaagtatatatgagtaaacttggtctgacagttaccaatgcttaatcagtgaggcacctatctcagcgatctgtctatttcgttcatccatagttgcctgactccccgtcgtgtagataactacgatacgggagggcttaccatctggccccagtgctgcaatgataccgcgagacccacgctcaccggctccagatttatcagcaataaaccagccagccggaagggccgagcgcagaagtggtcctgcaactttatccgcctccatccagtctattaattgttgccgggaagctagagtaagtagttcgccagttaatagtttgcgcaacgttgttgccattgctacaggcatcgtggtgtcacgctcgtcgtttggtatggcttcattcagctccggttcccaacgatcaaggcgagttacatgatcccccatgttgtgcaaaaaagcggttagctccttcggtcctccgatcgttgtcagaagtaagttggccgcagtgttatcactcatggttatggcagcactgcataattctcttactgtcatgccatccgtaagatgcttttctgtgactggtgagtactcaaccaagtcattctgagaatagtgtatgcggcgaccgagttgctcttgcccggcgtcaatacgggataataccgcgccacatagcagaactttaaaagtgctcatcattggaaaacgttcttcggggcgaaaactctcaaggatcttaccgctgttgagatccagttcgatgtaacccactcgtgcacccaactgatcttcagcatcttttactttcaccagcgtttctgggtgagcaaaaacaggaaggcaaaatgccgcaaaaaagggaataagggcgacacggaaatgttgaatactcatactcttcctttttcaatattattgaagcatttatcagggttattgtctcatgagcggatacatatttgaatgtatttagaaaaataaacaaataggggttccgcgcacatttccccgaaaagtgccacctgacgtc

SEQ ID NO: 34 - DNA, 6592 bp, synthetic construct
  source 1..6592: mol_type = other DNA
gacggatcgggagatctcccgatcccctatggtcgactctcagtacaatctgctctgatgccgcatagttaagccagtatctgctccctgcttgtgtgttggaggtcgctgagtagtgcgcgagcaaaatttaagctacaacaaggcaaggcttgaccgacaattgcatgaagaatctgcttagggttaggcgttttgcgctgcttcgcgatgtacgggccagatatacgcgttgacattgattattgactagttattaatagtaatcaattacggggtcattagttcatagcccatatatggagttccgcgttacataacttacggtaaatggcccgcctggctgaccgcccaacgacccccgcccattgacgtcaataatgacgtatgttcccatagtaacgccaatagggactttccattgacgtcaatgggtggactatttacggtaaactgcccacttggcagtacatcaagtgtatcatatgccaagtacgccccctattgacgtcaatgacggtaaatggcccgcctggcattatgcccagtacatgaccttatgggactttcctacttggcagtacatctacgtattagtcatcgctattaccatggtgatgcggttttggcagtacatcaatgggcgtggatagcggtttgactcacggggatttccaagtctccaccccattgacgtcaatgggagtttgttttggcaccaaaatcaacgggactttccaaaatgtcgtaacaactccgccccattgacgcaaatgggcggtaggcgtgtacggtgggaggtctatataagcagagctctctggctaactagagaacccactgcttactggcttatcgaaattaatacgactcactatagggagacccaagcttggtaccgagctcggatccctacttccaatccaatgccaccatgggcaacgccctgaccgagatccagatcgagaagctgaggaatttcagcgactgcatcgtgatgcacccacagatcaagacaatcttcaacgactttgatgagctgaggctgaatcgcaagtttcagtccgaccagcagtgtatgctgctgatcggcgataccggcgtgggcaagtctcacacaatcaaccactacaagaagcgggtgctggccacccagaactattccagaaatacaatgcccgtgctggtgtcccggatcagccggggcaagggcctggacgccaccctggtgcagatgctggccgatctggagctgttcggcagctcccagatcaagaagcggggctacaagaccgatctgacaaagaagctggtggagtctctgatcaaggcccaggtggagctgctgatcatcaacgagttccaggagctgatcgagtttaagtctgtgcaggagagacagcagatcgccaatggcctgaagtttatcagcgaggaggccaaggtgcctatcgtgctggtgggcatgccatgggcagcaaagatcgcagaggagccacagtgggcctctaggctggtgcggaagagaaagctggagtatttcagcctgaagaacgactccaagtactttcgccagtatctgatgggcctggccaagaagatgcctttcgatgtgccccctaagctggagagcaagaacaccacaatcgccctgtttgcagcatgcaggggagagaatcgcgccctgaagcacctgctgctggaggccctgaagctggccctgagctgtaacgagtacctggagaataagcacttcatcaccgcctatgacaagtttgatttctttaacgacaaggagaagctgaagtccaagaatcctttcaagcaggacatcaaggatatcgaaatctacgaagtgatcaagaacagcagctataacccaaatgccctggaccccgaggatatgctgacagatcgggtgtttgccatcgtgaagggctccggcaagcggactgctgatggcagtgaatttgagtccccaaagaagaagagaaaggtggggagcggcaaaagaaccgccgacggcagcgaattcgagtcacccaagaagaagaggaaagtcggctccggaaaacggacagccgacggaagcgagttcgagtcaccgaaaaagaagcgaaaagtttaatctagagggccctattctatagtgtcacctaaatgctagagctcgctgatcagcctcgactgtgccttctagttgccagccatctgttgtttgcccctcccccgtgccttccttgaccctggaaggtgccactcccactgtcctttcctaataaaatgaggaaattgcatcgcattgtctgagtaggtgtcattctattctggggggtggggtggggcaggacagcaagggggaggattgggaagacaatagcaggcatgctggggatgcggtgggctctatggcttctgaggcggaaagaaccagctggggctctagggggtatccccacgcgccctgtagcggcgcattaagcgcggcgggtgtggtggttacgcgcagcgtgaccgctacacttgccagcgccctagcgcccgctcctttcgctttcttcccttcctttctcgccacgttcgccggctttccccgtcaagctctaaatcggggcatccctttagggttccgatttagtgctttacggcacctcgaccccaaaaaacttgattagggtgatggttcacgtagtgggccatcgccctgatagacggtttttcgccctttgacgttggagtccacgttctttaatagtggactcttgttccaaactggaacaacactcaaccctatctcggtctattcttttgatttataagggattttggggatttcggcctattggttaaaaaatgagctgatttaacaaaaatttaacgcgaattaattctgtggaatgtgtgtcagttagggtgtggaaagtccccaggctccccaggcaggcagaagtatgcaaagcatgcatctcaattagtcagcaaccaggtgtggaaagtccccaggctccccagcaggcagaagtatgcaaagcatgcatctcaattagtcagcaaccatagtcccgcccctaactccgcccatcccgcccctaactccgcccagttccgcccattctccgccccatggctgactaattttttttatttatgcagaggccgaggccgcctctgcctctgagctattccagaagtagtgaggaggcttttttggaggcctaggcttttgcaaaaagctcccgggagcttgtatatccattttcggatctgatcaagagacaggatgaggatcgtttcgcatgattgaacaagatggattgcacgcaggttctccggccgcttgggtggagaggctattcggctatgactgggcacaacagacaatcggctgctctgatgccgccgtgttccggctgtcagcgcaggggcgcccggttctttttgtcaagaccgacctgtccggtgccctgaatgaactgcaggacgaggcagcgcggctatcgtggctggccacgacgggcgttccttgcgcagctgtgctcgacgttgtcactgaagcgggaagggactggctgctattgggcgaagtgccggggcaggatctcctgtcatctcaccttgctcctgccgagaaagtatccatcatggctgatgcaatgcggcggctgcatacgcttgatccggctacctgcccattcgaccaccaagcgaaacatcgcatcgagcgagcacgtactcggatggaagccggtcttgtcgatcaggatgatctggacgaagagcatcaggggctcgcgccagccgaactgttcgccaggctcaaggcgcgcatgcccgacggcgaggatctcgtcgtgacccatggcgatgcctgcttgccgaatatcatggtggaaaatggccgcttttctggattcatcgactgtggccggctgggtgtggcggaccgctatcaggacatagcgttggctacccgtgatattgctgaagagcttggcggcgaatgggctgaccgcttcctcgtgctttacggtatcgccgctcccgattcgcagcgcatcgccttctatcgccttcttgacgagttcttctgagcgggactctggggttcgaaatgaccgaccaagcgacgcccaacctgccatcacgagatttcgattccaccgccgccttctatgaaaggttgggcttcggaatcgttttccgggacgccggctggatgatcctccagcgcggggatctcatgctggagttcttcgcccaccccaacttgtttattgcagcttataatggttacaaataaagcaatagcatcacaaatttcacaaataaagcatttttttcactgcattctagttgtggtttgtccaaactcatcaatgtatcttatcatgtctgtataccgtcgacctctagctagagcttggcgtaatcatggtcatagctgtttcctgtgtgaaattgttatccgctcacaattccacacaacatacgagccggaagcataaagtgtaaagcctggggtgcctaatgagtgagctaactcacattaattgcgttgcgctcactgcccgctttccagtcgggaaacctgtcgtgccagctgcattaatgaatcggccaacgcgcggggagaggcggtttgcgtattgggcgctcttccgcttcctcgctcactgactcgctgcgctcggtcgttcggctgcggcgagcggtatcagctcactcaaaggcggtaatacggttatccacagaatcaggggataacgcaggaaagaacatgtgagcaaaaggccagcaaaaggccaggaaccgtaaaaaggccgcgttgctggcgtttttccataggctccgcccccctgacgagcatcacaaaaatcgacgctcaagtcagaggtggcgaaacccgacaggactataaagataccaggcgtttccccctggaagctccctcgtgcgctctcctgttccgaccctgccgcttaccggatacctgtccgcctttctcccttcgggaagcgtggcgctttctcaatgctcacgctgtaggtatctcagttcggtgtaggtcgttcgctccaagctgggctgtgtgcacgaaccccccgttcagcccgaccgctgcgccttatccggtaactatcgtcttgagtccaacccggtaagacacgacttatcgccactggcagcagccactggtaacaggattagcagagcgaggtatgtaggcggtgctacagagttcttgaagtggtggcctaactacggctacactagaaggacagtatttggtatctgcgctctgctgaagccagttaccttcggaaaaagagttggtagctcttgatccggcaaacaaaccaccgctggtagcggtggtttttttgtttgcaagcagcagattacgcgcagaaaaaaaggatctcaagaagatcctttgatcttttctacggggtctgacgctcagtggaacgaaaactcacgttaagggattttggtcatgagattatcaaaaaggatcttcacctagatccttttaaattaaaaatgaagttttaaatcaatctaaagtatatatgagtaaacttggtctgacagttaccaatgcttaatcagtgaggcacctatctcagcgatctgtctatttcgttcatccatagttgcctgactccccgtcgtgtagataactacgatacgggagggcttaccatctggccccagtgctgcaatgataccgcgagacccacgctcaccggctccagatttatcagcaataaaccagccagccggaagggccgagcgcagaagtggtcctgcaactttatccgcctccatccagtctattaattgttgccgggaagctagagtaagtagttcgccagttaatagtttgcgcaacgttgttgccattgctacaggcatcgtggtgtcacgctcgtcgtttggtatggcttcattcagctccggttcccaacgatcaaggcgagttacatgatcccccatgttgtgcaaaaaagcggttagctccttcggtcctccgatcgttgtcagaagtaagttggccgcagtgttatcactcatggttatggcagcactgcataattctcttactgtcatgccatccgtaagatgcttttctgtgactggtgagtactcaaccaagtcattctgagaatagtgtatgcggcgaccgagttgctcttgcccggcgtcaatacgggataataccgcgccacatagcagaactttaaaagtgctcatcattggaaaacgttcttcggggcgaaaactctcaaggatcttaccgctgttgagatccagttcgatgtaacccactcgtgcacccaactgatcttcagcatcttttactttcaccagcgtttctgggtgagcaaaaacaggaaggcaaaatgccgcaaaaaagggaataagggcgacacggaaatgttgaatactcatactcttcctttttcattattattgaagcatttatcagggttattgtctcatgagcggatacatatttgaatgtatttagaaaaataaacaaataggggttccgcgcacatttccccgaaaagtgccacctgacgtc

SEQ ID NO: 35 - DNA, 7922 bp, synthetic construct
  source 1..7922: mol_type = other DNA
gacggatcgggagatctcccgatcccctatggtgcactctcagtacaatctgctctgatgccgcatagttaagccagtatctgctccctgcttgtgtgttggaggtcgctgagtagtgcgcgagcaaaatttaagctacaacaaggcaaggcttgaccgacaattgcatgaagaatctgcttagggttaggcgttttgcgctgcttcgcgatgtacgggccagatatacgcgttgacattgattattgactagttattaatagtaatcaattacggggtcattagttcatagcccatatatggagttccgcgttacataacttacggtaaatggcccgcctggctgaccgcccaacgacccccgcccattgacgtcaataatgacgtatgttcccatagtaacgccaatagggactttccattgacgtcaatgggtggagtatttacggtaaactgcccacttggcagtacatcaagtgtatcatatgccaagtacgccccctattgacgtcaatgacggtaaatggcccgcctggcattatgcccagtacatgaccttatgggactttcctacttggcagtacatctacgtattagtcatcgctattaccatggtgatgcggttttggcagtacatcaatgggcgtggatagcggtttgactcacggggatttccaagtctccaccccattgacgtcaatgggagtttgttttggcaccaaaatcaacgggactttccaaaatgtcgtaacaactccgccccattgacgcaaatgggcggtaggcgtgtacggtgggaggtctatataagcagagctctctggctaactagagaacccactgcttactggcttatcgaaattaatacgactcactatagggagacccaagctggctagcgtttaaacttaagcttggtaccgccaccatgtacatcagaaacctgagaaagccttctccaaacaagaacgtgttcaagttcgcctccaccaaggtgtccagcgtggtgatgtgcgagagcagcctggagttcgacgcctgcttccaccacgagtacaacgaccttatcgagtctttcggcagccaacctgagggcttcaaatacgagttcatgggcaagtccctgccttatacacctgatgccctgatcagctacaccgataagacacagaaataccacgagtacaagccctactctaagatcgccagccctctgttccgggctgaatttgccgccaagcgggccgcttctctgaaactgggaatcgacctggtcctggtgaccgacagacagatcagagtgaaccctatcctgaacaatctgaagctgctgcatagatacagcggcgtgtacggcatcagcggcatccagaaggaactgctgagctttatccacaaaagcggcgttatcaagctgaatgacatcagcagccaggtgggaatccccatcggcgaaacccggagcttcctgtttggcctcatgcacaagggcctggtgaaggccgacctgggctgtgatgacctgaccaacaaccccaccctgtgggccacacctggcagcggctccggaaaacggacagccgacggaagcgagttcgagtcaccaaagaagaagcggaaagtcggatccggctctggaggcatgaccgatttctttaacgagttcgacgagagcctggtgcccctgaagcctcagaccccaacacagtacgtgaagctggacgatgccaacctgatccagcgggatctggacaccttctccgataccttcaagaatcaggccctgcagagatataagctgatctccaccatcgacaagaagctgtctaggggctggacacagcgcaacctggaccccatcctggacgagctgttcaagggcggcgacgtggtgaggcctaattggcgcacagtggcccggtggagaaagaagtacatcgagtctaacggcgatatcgccagcctggccgacaagaatcacaagatgggcaacaggaccaatcgcatcaagggcgacgataagttctttgataaggccctggagcggttcctggacgccaagagacctacaatcgccaccgcctatcagtactataaggatctgatcgtgatcgagaacgagtccatcgtggagggcaagatcccaatcatctcttacaacgcctttaataagaggatcaaggccatcccaccttatgcagtggcagtggcacgccacggcaagttcaaggccgaccagtggtttgcatactgcgcagcacacgtgccaccaaccagaatcctggagcgggtggagatcgatcacacacccctggacctgatcctgctggacgatgagctgctgatcccaatcggcaggccctatctgacactgctgatcgacgtgttcagcggctgcgtgctgggctttcacctgagctacaagagcccttcctacgtgagcgccgcaaaggcaatcacccacgccatcaagccaaagtccctggatgccctgaacatcgagctgcagaatgactggccctgcttcggcaagtttgagaacctggtggtggacaatggcgccgagttctggtctaagaacctggagcacgcctgtcagagcgccggcatcaacatccagtacaatcctgtgaggaagccctggctgaagccctttatcgagcggttcttcggcgtgatgaacgagtacttcctgcccgagctgcctggcaagaccttttctaatatcctggagaaggaggagtataagcccgagaaggacgccatcatgcggttcagcacatttgtggaggagttccacagatggatcgccgacgtgtaccaccaggactctaatagccgggagaccagaatccctatcaagaggtggcagcagggcttcgatgcctatcctccactgaccatgaacgaggaggaggagacaaggttttccatgctgatgcgcatctccgactctaggaccctgacacgcaatggctttaagtaccaggagctgatgtatgattctaccgccctggccgactaccgcaagcactatccacagacaaaggagaccgtgaagaagctgatcaaggtggaccccgacgatatcagcaaaatctacgtgtacctggaggagctggagtcctacctggaggtgccttgcacagatccaaccggctacacagacggcctgagcatctatgagcacaagaccatcaagaagatcaaccgggaagtgatcagagagagcaaggactccctgggcctggccaaggcaaggatggccatccacgagagagtgaagcaggagcaggaggtgttcatcgagtccaagaccaaggccaagatcacagccgtgaagaagcaggcccagatcgccgatgtgagcaataccggcacatccaccatcaaggtgtctgaggagagcgccgcaccagtgcagaagcacatctccaacgacaattctgacgattgggacgatgacctggaggcctttgagtgatctagagggcccgtttaaacccgctgatcagcctcgactgtgccttctagttgccagccatctgttgtttgcccctcccccgtgccttccttgaccctggaaggtgccactcccactgtcctttcctaataaaatgaggaaattgcatcgcattgtctgagtaggtgtcattctattctggggggtggggtggggcaggacagcaagggggaggattgggaagacaatagcaggcatgctggggatgcggtgggctctatggcttctgaggcggaaagaaccagctggggctctagggggtatccccacgcgccctgtagcggcgcattaagcgcggcgggtgtggtggttacgcgcagcgtgaccgctacacttgccagcgccctagcgcccgctcctttcgctttcttcccttcctttctcgccacgttcgccggctttccccgtcaagctctaaatcgggggctccctttagggttccgatttagtgctttacggcacctcgaccccaaaaaacttgattagggtgatggttcacgtagtgggccatcgccctgatagacggtttttcgccctttgacgttggagtccacgttctttaatagtggactcttgttccaaactggaacaacactcaaccctatctcggtctattcttttgatttataagggattttgccgatttcggcctattggttaaaaaatgagctgatttaacaaaaatttaacgcgaattaattctgtggaatgtgtgtcagttagggtgtggaaagtccccaggctccccagcaggcagaagtatgcaaagcatgcatctcaattagtcagcaaccaggtgtggaaagtccccaggctccccagcaggcagaagtatgcaaagcatgcatctcaattagtcagcaaccatagtcccgcccctaactccgcccatcccgcccctaactccgcccagttccgcccattctccgccccatggctgactaattttttttatttatgcagaggccgaggccgcctctgcctctgagctattccagaagtagtgaggaggcttttttggaggcctaggcttttgcaaaaagctcccgggagcttgtatatccattttcggatctgatcaagagacaggatgaggatcgtttcgcatgattgaacaagatggattgcacgcaggttctccggccgcttgggtggagaggctattcggctatgactgggcacaacagacaatcggctgctctgatgccgccgtgttccggctgtcagcgcaggggcgcccggttctttttgtcaagaccgacctgtccggtgccctgaatgaactgcaggacgaggcagcgcggctatcgtggctggccacgacgggcgttccttgcgcagctgtgctcgacgttgtcactgaagcgggaagggactggctgctattgggcgaagtgccggggcaggatctcctgtcatctcaccttgctcctgccgagaaagtatccatcatggctgatgcaatgcggcggctgcatacgcttgatccggctacctgcccattcgaccaccaagcgaaacatcgcatcgagcgagcacgtactcggatggaagccggtcttgtcgatcaggatgatctggacgaagagcatcaggggctcgcgccagccgaactgttcgccaggctcaaggcgcgcatgcccgacggcgaggatctcgtcgtgacccatggcgatgcctgcttgccgaatatcatggtggaaaatggccgcttttctggattcatcgactgtggccggctgggtgtggcggaccgctatcaggacatagcgttggctacccgtgatattgctgaagagcttggcggcgaatgggctgaccgcttcctcgtgctttacggtatcgccgctcccgattcgcagcgcatcgccttctatcgccttcttgacgagttcttctgagcgggactctggggttcgaaatgaccgaccaagcgacgcccaacctgccatcacgagatttcgattccaccgccgccttctatgaaaggttgggcttcggaatcgttttccgggacgccggctggatgatcctccagcgcggggatctcatgctggagttcttcgcccaccccaacttgtttattgcagcttataatggttacaaataaagcaatagcatcacaaatttcacaaataaagcatttttttcactgcattctagttgtggtttgtccaaactcatcaatgtatcttatcatgtctgtataccgtcgacctctagctagagcttggcgtaatcatggtcatagctgtttcctgtgtgaaattgttatccgctcacaattccacacaacatacgagccggaagcataaagtgtaaagcctggggtgcctaatgagtgagctaactcacattaattgcgttgcgctcactgcccgctttccagtcgggaaacctgtcgtgccagctgcattaatgaatcggccaacgcgcggggagaggcggtttgcgtattgggcgctcttccgcttcctcgctcactgactcgctgcgctcggtcgttcggctgcggcgagcggtatcagctcactcaaaggcggtaatacggttatccacagaatcaggggataacgcaggaaagaacatgtgagcaaaaggccagcaaaaggccaggaaccgtaaaaaggccgcgttgctggcgtttttccataggctccgcccccctgacgagcatcacaaaaatcgacgctcaagtcagaggtggcgaaacccgacaggactataaagataccaggcgtttccccctggaagctccctcgtgcgctctcctgttccgaccctgccgcttaccggatacctgtccgcctttctcccttcgggaagcgtggcgctttctcatagctcacgctgtaggtatctcagttcggtgtaggtcgttcgctccaagctgggctgtgtgcacgaaccccccgttcagcccgaccgctgcgccttatccggtaactatcgtcttgagtccaacccggtaagacacgacttatcgccactggcagcagccactggtaacaggattagcagagcgaggtatgtaggcggtgctacagagttcttgaagtggtggcctaactacggctacactagaagaacagtatttggtatctgcgctctgctgaagccagttaccttcggaaaaagagttggtagctcttgatccggcaaacaaaccaccgctggtagcggtttttttgtttgcaagcagcagattacgcgcagaaaaaaaggatctcaagaagatcctttgatcttttctacggggtctgacgctcagtggaacgaaaactcacgttaagggattttggtcatgagattatcaaaaaggatcttcacctagatccttttaaattaaaaatgaagttttaaatcaatctaaagtatatatgagtaaacttggtctgacagttaccaatgcttaatcagtgaggcacctatctcagcgatctgtctatttcgttcatccatagttgcctgactccccgtcgtgtagataactacgatacgggagggcttaccatctggccccagtgctgcaatgataccgcgagacccacgctcaccggctccagatttatcagcaataaaccagccagccggaagggccgagcgcagaagtggtcctgcaactttatccgcctccatccagtctattaattgttgccgggaagctagagtaagtagttcgccagttaatagtttgcgcaacgttgttgccattgctacaggcatcgtggtgtcacgctcgtcgtttggtatggcttcattcagctccggttcccaacgatcaaggcgagttacatgatcccccatgttgtgcaaaaaagcggttagctccttcggtcctccgatcgttgtcagaagtaagttggccgcagtgttatcactcatggttatggcagcactgcataattctcttactgtcatgccatccgtaagatgcttttctgtgactggtgagtactcaaccaagtcattctgagaatagtgtatgcggcgaccgagttgctcttgcccggcgtcaatacgggataataccgcgccacatagcagaactttaaaagtgctcatcattggaaaacgttcttcggggcgaaaactctcaaggatcttaccgctgttgagatccagttcgatgtaacccactcgtgcacccaactgatcttcagcatcttttactttcaccagcgtttctgggtgagcaaaaacaggaaggcaaaatgccgcaaaaaagggaataagggcgacacggaaatgttgaatactcatactcttcctttttcaatattattgaagcatttatcagggttattgtctcatgagcggatacatatttgaatgtatttagaaaaataaacaaataggggttccgcgcacatttccccgaaaagtgccacctgacgtc

SEQ ID NO: 36 - DNA, 3092 bp, synthetic construct
  source 1..3092: mol_type = other DNA
ctggagtgaataccacgacgatttccggcagtttctacacatatattcgcaagatgtggcgtgttacggtgaaaacctggcctatttccctaaagggtttattgagaatatgtttttcgtctcagccaatccctgggtgagtttcaccagttttgatttaaacgtggccaatatggacaacttcttcgcccccgttttcactatgggcaaatattatacgcaaggcgacaaggtgctgatgccgctggcgattcaggttcatcatgccgtctgtgatggcttccatgtcggcagaatgcttaatgaattacaacagtactgcgatgagtggcagggcggggcgtaatttttttaaggcagttattggtgcccttctagagtccttactgcagtagttttgctgaaatactcgattcacaaaaatatcaacttatggttgttttgtgagatatcaatatatggttgttttgtggttaagttgctgattataaataattattaaatatcactttatggttgcatcaacaggtaccttaagccaacctgttaggatccctctagagtagtagtccatgggtatggacagcggtggaggggaattcccatgtcagccgttaagtgttcctgtgtcactcaaaattgctttgagaggctctaagggcttctcagtgcgttacatccctggcttgttgtccacaaccgttaaaccttaaaagctttaaaagccttatatattcttttttttcttataaaacttaaaaccttagaggctatttaagttgctgatttatattaattttattgttcaaacatgagagcttagtacgtgaaacatgagagcttagtacgttagccatgagagcttagtacgttagccatgagggtttagttcgttaaacatgagagcttagtacgttaaacatgagagcttagtacgtgaaacatgagagcttagtacgtactatcaacaggttgaactgctgatcttcagatcctctacgccggacgcatcgtggccggatcaattccgttttccgctgcataaccctgcttcggggtcattatagcgattttttcggtatatccatcctttttcgcacgatatacaggattttgccaaagggttcgtgtagactttccttggtgtatccaacggcgtcagccgggcaggataggtgaagtaggcccacccgcgagcgggtgttccttcttcactgtcccttattcgcacctggcggtgctcaacgggaatcctgctctgcgaggctggccggctaccgccggcgtaacagatgagggcaagcggatggctgatgaaaccaagccaaccaggaagggcagcccacctatcacggaattgatccccctcgaattgacgcgtaaccagcaatagacataagcggctatttaacgaccctgccctgaaccgacgaccgggtcgaatttgctttcgaatttctgccattcatccgcttattatcacttattcaggcgtagcaaccaggcgtttaagggcaccaataactgccttaaaaaaattagaaaaactcatcgagcatcaaatgaaactgcaatttattcatatcaggattatcaataccatatttttgaaaaagccgtttctgtaatgaaggagaaaactcaccgaggcagttccataggatggcaagatcctggtatcggtctgcgattccgactcgtccaacatcaatacaacctattaatttcccctcgtcaaaaataaggttatcaagtgagaaatcaccatgagtgacgactgaatccggtgagaatggcaaaagtttatgcatttctttccagacttgttcaacaggccagccattacgctcgtcatcaaaatcactcgcatcaaccaaaccgttattcattcgtgattgcgcctgagcgagacgaaatacgcgatcgctgttaaaaggacaattacaaacaggaatcgaatgcaaccggcgcaggaacactgccagcgcatcaacaatattttcacctgaatcaggatattcttctaatacctggaatgctgtttttccggggatcgcagtggtgagtaaccatgcatcatcaggagtacggataaaatgcttgatggtcggaagaggcataaattccgtcagccagtttagtctgaccatctcatctgtaacatcattggcaacgctacctttgccatgtttcagaaacaactctggcgcatcgggcttcccatacaagcgatagattgtcgcacctgattgcccgacattatcgcgagcccatttatacccatataaatcagcatccatgttggaatttaatcgcggcctcgacgtttcccgttgaatatggctcatactcttcctttttcaatattattgaagcatttatcagggttattgtctcatgagcggatacatatttgaatgtatttagaaaaataaacaaataggggttccgcgcacatttccccgaaaagtgccacctgacgtctaagaaaccattattatcatgacattaacctataaaaataggcgtatcacgaggccctttcgtcacgcgtcctcggtacctaacaccggtcgccaagctttgttgatacaaccataaaatgataattacacccataaattgataattatcacacccagatcaggacgctcgacctggagaattcgccaccatgatcggcacgtaagaggttccaactttcaccataatgaaataagatcactaccgggcgtattttttgagttatcgagattttcaggagctaaggaagctaaaatggagaaaaaaatcactggatataccaccgttgatatatcccaatggcatcgtaaagaacattttgaggcatttcagtcagttgctcaatgtacctataaccagaccgttcagctggatattacggcctttttaaagaccgtaaagaaaaataagcacaagttttatccggcctttattcacattcttgcccgcctgatgaatgctcatccggagttccgtatggcaatgaaagacggtgagctggtgatatgggatagtgttcacccttgttacaccgttttccatgagcaaactgaaacgttttcatcgct

SEQ ID NO: 37 - DNA, 3028 bp, synthetic construct
  source 1..3028: mol_type = other DNA
ttgagatcctttttttctgcgcgtaatctgctgcttgcaaacaaaaaaaccaccgctaccagcggtggtttgtttgccggatcaagagctaccaactctttttccgaaggtaactggcttcagcagagcgcagataccaaatactgttcttctagtgtagccgtagttaggccaccacttcaagaactctgtagcaccgcctacatacctcgctctgctaatcctgttaccagtggctgctgccagtggcgataagtcgtgtcttaccgggttggactcaagacgatagttaccggataaggcgcagcggtcgggctgaacggggggttcgtgcacacagcccagcttggagcgaacgacctacaccgaactgagatacctacagcgtgagctatgagaaagcgccacgcttcccgaagggagaaaggcggacaggtatccggtaagcggcagggtcggaacaggagagcgcacgagggagcttccagggggaaacgcctggtatctttatagtcctgtcgggtttcgccacctctgacttgagcgtcgatttttgtgatgctcgtcaggggggcggagcctatggaaaaacgccagcaacgcggcctttttacggttcctggccttttgctggccttttgctcacatgttctttcctgcgttatcccctgattctgtggataaccgtattaccgcctttgagtgagctgataccgctcgccgcagccgaacgaccgagcgcagcgagtcagtgagcgaggaagcggaagagcgtgttgatcggctttaaggatctagtgtcgctgcaaccatagtttgacataatgcaaccataccttgacataattaaagtcatactctgacataaagccccctggagaattcgccaccatgatcggcacgtaagaggttccaactttcaccataatgaaataagatcactaccgggcgtattttttgagttatcgagattttcaggagctaaggaagctaaaatggagaaaaaaatcactggatataccaccgttgatatatcccaatggcatcgtaaagaacattttgaggcatttcagtcagttgctcaatgtacctataaccagaccgttcagctggatattacggcctttttaaagaccgtaaagaaaaataagcacaagttttatccggcctttattcacattcttgcccgcctgatgaatgctcatccggagttccgtatggcaatgaaagacggtgagctggtgatatgggatagtgttcacccttgttacaccgttttccatgagcaaactgaaacgttttcatcgctctggagtgaataccacgacgatttccggcagtttctacacatatattcgcaagatgtggcgtgttacggtgaaaacctggcctatttccctaaagggtttattgagaatatgtttttcgtctcagccaatccctgggtgagtttcaccagttttgatttaaacgtggccaatatggacaacttcttcgcccccgttttcactatgggcaaatattatacgcaaggcgacaaggtgctgatgccgctggcgattcaggttcatcatgccgtctgtgatggcttccatgtcggcagaatgcttaatgaattacaacagtactgcgatgagtggcagggcggggcgtaatttttttaaggcagttattggtgcccttctagagtcggctggtttttttgtttttagcgttataacttttatttcactatgtcactgtatggttgcattttatgtcagtgaatggttgcaggttttttgtaagttattgatatgcctatccagtgtatgtcacgctttgcttgcagcgacatctaggatcttagcgcgcttttatggacgtcaggtggcacttttcggggaaatgtgcgcggaacccctatttgtttatttttctaaatacattcaaatatgtatccgctcatgagacaataaccctgataaatgcttcaataatattgaaaaaggaagagtatgagtattcaacatttccgtgtcgcccttattcccttttttgcggcattttgccttcctgtttttgctcacccagaaacgctggtgaaagtaaaagatgctgaagatcagttgggtgcacgagtgggttacatcgaactggatctcaacagcggtaagatccttgagagttttcgccccgaagaacgttttccaatgatgagcacttttaaagttctgctatgtggcgcggtattatcccgtattgacgccgggcaagagcaactcggtcgccgcatacactattctcagaatgacttggttgagtactcaccagtcacagaaaagcatcttacggatggcatgacagtaagagaattatgcagtgctgccataaccatgagtgataacactgcggccaacttacttctgacaacgatcggaggaccgaaggagctaaccgcttttttgcacaacatgggggatcatgtaactcgccttgatcgttgggaaccggagctgaatgaagccataccaaacgacgagcgtgacaccacgatgcctgtagcaatggcaacaacgttgcgcaaactattaactggcgaactacttactctagcttcccggcaacaattaatagactggatggaggcggataaagttgcaggaccacttctgcgctcggcccttccggctggctggtttattgctgataaatctggagccggtgagcgtgggtctcgcggtatcattgcagcactggggccagatggtaagccctcccgtatcgtagttatctacacgacggggagtcaggcaactatggatgaacgaaatagacagatcgctgagataggtgcctcactgattaagcattggtaactgtcagaccaagtttactcatatatactttagattgatttaaaacttcatttttaatttaaaaggatctaggtgaagatcctttttgataatctcatgaccaaaatcccttaacgtgagttttcgttccactgagcgtcagaccccgtagaaaagatcaaaggatcttc

SEQ ID NO: 38 - DNA, 3077 bp, synthetic construct
  source 1..3077: mol_type = other DNA
ttgagatcctttttttctgcgcgtaatctgctgcttgcaaacaaaaaaaccaccgctaccagcggtggtttgtttgccggatcaagagctaccaactctttttccgaaggtaactggcttcagcagagcgcagataccaaatactgttcttctagtgtagccgtagttaggccaccacttcaagaactctgtagcaccgcctacatacctcgctctgctaatcctgttaccagtggctgctgccagtggcgataagtcgtgtcttaccgggttggactcaagacgatagttaccggataaggcgcagcggtcgggctgaacggggggttcgtgcacacagcccagcttggagcgaacgacctacaccgaactgagatacctacagcgtgagctatgagaaagcgccacgcttcccgaagggagaaaggcggacaggtatccggtaagcggcagggtcggaacaggagagcgcacgagggagcttccagggggaaacgcctggtatctttatagtcctgtcgggtttcgccacctctgacttgagcgtcgatttttgtgatgctcgtcaggggggcggagcctatggaaaaacgccagcaacgcggcctttttacggttcctggccttttgctggccttttgctcacatgttctttcctgcgttatcccctgattctgtggataaccgtattaccgcctttgagtgagctgataccgctcgccgcagccgaacgaccgagcgcagcgagtcagtgagcgaggaagcggaagagcgtgttgatcggctttaaggatctagtgtcgctgcaaccatagtttgacataatgcaaccataccttgacataattaaagtcatactctgacataaagccccctggagaattcgccaccatgatcagcatgctcgagatcggcacgtaagaggttccaactttcaccataatgcaagggcgaggaggataaaataagatcactaccgggcgtattttttgagttatcgagattttcaggagctaaggaagctaaaatggagaaaaaaatcactggatataccaccgttgatatatcccaatggcatcgtaaagaacattttgaggcatttcagtcagttgctcaatgtacctataaccagaccgttcagctggatattacggcctttttaaagaccgtaaagaaaaataagcacaagttttatccggcctttattcacattcttgcccgcctgatgaatgctcatccggagttccgtatggcaatgaaagacggtgagctggtgatatgggatagtgttcacccttgttacaccgttttccatgagcaaactgaaacgttttcatcgctctggagtgaataccacgacgatttccggcagtttctacacatatattcgcaagatgtggcgtgttacggtgaaaacctggcctatttccctaaagggtttattgagaatatgtttttcgtctcagccaatccctgggtgagtttcaccagttttgatttaaacgtggccaatatggacaacttcttcgcccccgttttcactatgggcaaatattatacgcaaggcgacaaggtgctgatgccgctggcgattcaggttcatcatgccgtctgtgatggcttccatgtcggcagaatgcttaatgaattacaacagtactgcgatgagtggcagggcggggcgtaatttttttaaggcagttattggtgcccttctagagtatcctcctcgcccttgtcggctggtttttttgtttttagcgttataacttttatttcactatgtcactgtatggttgcattttatgtcagtgaatggttgcaggttttttgtaagttattgatatgcctatccagtgtatgtcacgctttgcttgcagcgacatctaggatcttagcgcgcttttatggacgtcaggtggcacttttcggggaaatgtgcgcggaacccctatttgtttatttttctaaatacattcaaatatgtatccgctcatgagacaataaccctgataaatgcttcaataatattgaaaaaggaagagtatgagtattcaacatttccgtgtcgcccttattcccttttttgcggcattttgccttcctgtttttgctcacccagaaacgctggtgaaagtaaaagatgctgaagatcagttgggtgcacgagtgggttacatcgaactggatctcaacagcggtaagatccttgagagttttcgccccgaagaacgttttccaatgatgagcacttttaaagttctgctatgtggcgcggtattatcccgtattgacgccgggcaagagcaactcggtcgccgcatacactattctcagaatgacttggttgagtactcaccagtcacagaaaagcatcttacggatggcatgacagtaagagaattatgcagtgctgccataaccatgagtgataacactgcggccaacttacttctgacaacgatcggaggaccgaaggagctaaccgcttttttgcacaacatgggggatcatgtaactcgccttgatcgttgggaaccggagctgaatgaagccataccaaacgacgagcgtgacaccacgatgcctgtagcaatggcaacaacgttgcgcaaactattaactggcgaactacttactctagcttcccggcaacaattaatagactggatggaggcggataaagttgcaggaccacttctgcgctcggcccttccggctggctggtttattgctgataaatctggagccggtgagcgtgggtctcgcggtatcattgcagcactggggccagatggtaagccctcccgtatcgtagttatctacacgacggggagtcaggcaactatggatgaacgaaatagacagatcgctgagataggtgcctcactgattaagcattggtaactgtcagaccaagtttactcatatatactttagattgatttaaaacttcatttttaatttaaaaggatctaggtgaagatcctttttgataatctcatgaccaaaatcccttaacgtgagttttcgttccactgagcgtcagaccccgtagaaaagatcaaaggatcttc

SEQ ID NO: 39 - DNA, 4852 bp, synthetic construct
  source 1..4852: mol_type = other DNA
actcatatatactttagattgatttaaaacttcatttttaatttaaaaggatctaggtgaagatcctttttgataatctcatgaccaaaatcccttaacgtgagttttcgttccactgagcgtcagaccccgtagaaaagatcaaaggatcttcttgagatcctttttttctgcgcgtaatctgctgcttgcaaacaaaaaaaccaccgctaccagcggtggtttgtttgccggatcaagagctaccaactctttttccgaaggtaactggcttcagcagagcgcagataccaaatactgttcttctagtgtagccgtagttaggccaccacttcaagaactctgtagcaccgcctacatacctcgctctgctaatcctgttaccagtggctgctgccagtggcgataagtcgtgtcttaccgggttggactcaagacgatagttaccggataaggcgcagcggtcgggctgaacggggggttcgtgcacacagcccagcttggagcgaacgacctacaccgaactgagatacctacagcgtgagctatgagaaagcgccacgcttcccgaagggagaaaggcggacaggtatccggtaagcggcagggtcggaacaggagagcgcacgagggagcttccagggggaaacgcctggtatctttatagtcctgtcgggtttcgccacctctgacttgagcgtcgatttttgtgatgctcgtcaggggggcggagcctatggaaaaacgccagcaacgcggcctttttacggttcctggccttttgctggccttttgctcacatgttctttcctgcgttatcccctgattctgtggataaccgtattaccgcctttgagtgagctgataccgctcgccgcagccgaacgaccgagcgcagcgagtcagtgagcgaggaagcggaagagcgcccaatacgcaaaccgcctctccccgcgcgttggccgattcattaatgcagctggcacgacaggtttcccgactggaaagcgggcagtgagcgcaacgcaattaatgtgagttagctcactcattaggcaccccaggctttacactttatgcttccggctcgtatgttgtgtggaattgtgagcggataacaatttcacacaggaaacagctatgaccatgattacgccaacgtttaataaataataaataataaaataaaaaataaaaaataaataagatacattgatgagtttggacaaaccacaactagaatgcagtgaaaaaaatgctttatttgtgaaatttgtgatgctattgctttatttgtaaccattataagctgcaataaacaagttaagctttgtcgctgcaaccatagtttgacataatgcaaccataccttgacataattaaagtcatactctgacataaagcccccactggattgtacaattacgatcagcatgctcgaactgcttactggctttaagtttgtacaaaaaagagctgacctcttctcttcctcccacagggcctcgagagatctggcagcggagagggcagaggaagtctgctaacatgcggtgacgtcgaggagaatcctggccctaggctcgagatgaccgagtacaagcccacggtgcgcctcgccacccgcgacgacgtccccagggccgtacgcaccctcgccgccgcgttcgccgactaccccgccacgcgccacaccgtcgatccggaccgccacatcgagcgggtcaccgagctgcaagaactcttcctcacgcgcgtcgggctcgacatcggcaaggtgtgggtcgcggacgacggcgccgcggtggcggtctggaccacgccggagagcgtcgaagcgggggcggtgttcgccgagatcggcccgcgcatggccgagttgagcggttcccggctggccgcgcagcaacagatggaaggcctcctggcgccgcaccggcccaaggagcccgcgtggttcctggccaccgtcggagtctcgcccgaccaccagggcaagggtctgggcagcgccgtcgtgctccccggagtggaggcggccgagcgcgccggggtgcccgccttcctggagacctccgcgccccgcaacctccccttctacgagcggctcggcttcaccgtcaccgccgacgtcgaggtgcccgaaggaccgcgcacctggtgcatgacccgcaagcccggtgccggcagtggagagggcagaggaagtctgctaacatgcggtgacgtcgaggagaatcctggcccagtgagcaagggcgaggagctgttcaccggggtggtgcccatcctggtcgagctggacggcgacgtaaacggccacaagttcagcgtgtccggcgagggcgagggcgatgccacctacggcaagctgaccctgaagttcatctgcaccaccggcaagctgcccgtgccctggcccaccctcgtgaccaccctgacctacggcgtgcagtgcttcagccgctaccccgaccacatgaagcagcacgacttcttcaagtccgccatgcccgaaggctacgtccaggagcgcaccatcttcttcaaggacgacggcaactacaagacccgcgccgaggtgaagttcgagggcgacaccctggtgaaccgcatcgagctgaagggcatcgacttcaaggaggacggcaacatcctggggcacaagctggagtacaactacaacagccacaacgtctatatcatggccgacaagcagaagaacggcatcaaggtgaacttcaagatccgccacaacatcgaggacggcagcgtgcagctcgccgaccactaccagcagaacacccccatcggcgacggccccgtgctgctgcccgacaaccactacctgagcacccagtgcgccctgagcaaagaccccaacgagaagcgcgatcacatggtcctgctggagttcgtgaccgccgccgggatcactctcggcatggacgagctgtacaaggaattctaactagagctcgctgatcagcctcgactgtgccttctagttgccagccatctgttgtttgcccctcccccgtgccttccttgaccctggaaggtgccactcccactgtcctttcctaataaaatgaggaaattgcatcgcattgtctgagtaggtgtcattctattctggggggtggggtggggcaggacagcaagggggaggattgggaagagaatagcaggcatgctggggatcgaagacacagtcggctggtttttttgtttttagcgttataacttttatttcactatgtcactgtatggttgcattttatgtcagtgaatggttgcaggttttttgtaagttattgatatgcctatccagtgtatgtcacgctttgcttgcagcgacaggtaccgagctcgaattcactggccgtcgttttacaacgtcgtgactgggaaaaccctggcgttacccaacttaatcgccttgcagcacatccccctttcgccagctggcgtaatagcgaagaggcccgcaccgatcgcccttcccaacagttgcgcagcctgaatggcgaatggcgcctgatgcggtattttctccttacgcatctgtgcggtatttcacaccgcatatggtgcactctcagtacaatctgctctgatgccgcatagttaagccagccccgacacccgccaacacccgctgacgcgccctgacgggcttgtctgctcccggcatccgcttacagacaagctgtgaccgtctccgggagctgcatgtgtcagaggttttcaccgtcatcaccgaaacgcgcgagacgaaagggcctcgtgatacgcctatttttataggttaatgtcatgataataatggtttcttagacgtcaggtggcacttttcggggaaatgtgcgcggaacccctatttgtttatttttctaaatacattcaaatatgtatccgctcatgagacaataaccctgataaatgcttcaataatattgaaaaaggaagagtatgagtattcaacatttccgtgtcgcccttattcccttttttgcggcattttgccttcctgtttttgctcacccagaaacgctggtgaaagtaaaagatgctgaagatcagttgggtgcacgagtgggttacatcgaactggatctcaacagcggtaagatccttgagagttttcgccccgaagaacgttttccaatgatgagcacttttaaagttctgctatgtggcgcggtattatcccgtattgacgccgggcaagagcaactcggtcgccgcatacactattctcagaatgacttggttgagtactcaccagtcacagaaaagcatcttacggatggcatgacagtaagagaattatgcagtgctgccataaccatgagtgataacactgcggccaacttacttctgacaacgatcggaggaccgaaggagctaaccgcttttttgcacaacatgggggatcatgtaactcgccttgatcgttgggaaccggagctgaatgaagccataccaaacgacgagcgtgacaccacgatgcctgtagcaatggcaacaacgttgcgcaaactattaactggcgaactacttactctagcttcccggcaacaattaatagactggatggaggcggataaagttgcaggaccacttctgcgctcggcccttccggctggctggtttattgctgataaatctggagccggtgagcgtgggtctcgcggtatcattgcagcactggggccagatggtaagccctcccgtatcgtagttatctacacgacggggagtcaggcaactatggatgaacgaaatagacagatcgctgagataggtgcctcactgattaagcattggtaactgtcagaccaagttt

SEQ ID NO: 40 - DNA, 3077 bp, synthetic construct; identical to SEQ ID NO: 38
  source 1..3077: mol_type = other DNA

SEQ ID NO: 41 - DNA, 4872 bp, synthetic construct
  source 1..4872: mol_type = other DNA
gaggaccgaaggagctaaccgcttttttgcacaacatgggggatcatgtaactcgccttgatcgttgggaaccggagctgaatgaagccataccaaacgacgagcgtgacaccacgatgcctgtagcaatggcaacaacgttgcgcaaactattaactggcgaactacttactctagcttcccggcaacaattaatagactggatggaggcggataaagttgcaggaccacttctgcgctcggcccttccggctggctggtttattgctgataaatctggagccggtgagcgtgggtctcgcggtatcattgcagcactggggccagatggtaagccctcccgtatcgtagttatctacacgacggggagtcaggcaactatggatgaacgaaatagacagatcgctgagataggtgcctcactgattaagcattggtaactgtcagaccaagtttactcatatatactttagattgatttaaaacttcatttttaatttaaaaggatctaggtgaagatcctttttgataatctcatgaccaaaatcccttaacgtgagttttcgttccactgagcgtcagaccccgtagaaaagatcaaaggatcttcttgagatcctttttttctgcgcgtaatctgctgcttgcaaacaaaaaaaccaccgctaccagcggtggtttgtttgccggatcaagagctaccaactctttttccgaaggtaactggcttcagcagagcgcagataccaaatactgttcttctagtgtagccgtagttaggccaccacttcaagaactctgtagcaccgcctacatacctcgctctgctaatcctgttaccagtggctgctgccagtggcgataagtcgtgtcttaccgggttggactcaagacgatagttaccggataaggcgcagcggtcgggctgaacggggggttcgtgcacacagcccagcttggagcgaacgacctacaccgaactgagatacctacagcgtgagctatgagaaagcgccacgcttcccgaagggagaaaggcggacaggtatccggtaagcggcagggtcggaacaggagagcgcacgagggagcttccagggggaaacgcctggtatctttatagtcctgtcgggtttcgccacctctgacttgagcgtcgatttttgtgatgctcgtcaggggggcggagcctatggaaaaacgccagcaacgcggcctttttacggttcctggccttttgctggccttttgctcacatgttctttcctgcgttatcccctgattctgtggataaccgtattaccgcctttgagtgagctgataccgctcgccgcagccgaacgaccgagcgcagcgagtcagtgagcgaggaagcggaagagcgcccaatacgcaaaccgcctctccccgcgcgttggccgattcattaatgcagctggcacgacaggtttcccgactggaaagcgggcagtgagcgcaacgcaattaatgtgagttagctcactcattaggcaccccaggctttacactttatgcttccggctcgtatgttgtgtggaattgtgagcggataacaatttcacacaggaaacagctatgaccatgattacgccaacgtttaataaataataaataataaaataaaaaataaaaaataaataagatacattgatgagtttggacaaaccacaactagaatgcagtgaaaaaaatgctttatttgtgaaatttgtgatgctattgctttatttgtaaccattataagctgcaataaacaagttaagctttgtcgctgcaaccatagtttgacataatgcaaccataccttgacataattaaagtcatactctgacataaagcccccactggattgtacaattacgatcagcatgctcgaactgcttactggctttaagtttgtacaaaaaagagctctctccttgccagaacctctgacctcttctcttcctcccacagggcctcgagagatctggcagcggagagggcagaggaagtctgctaacatgcggtgacgtcgaggagaatcctggccctaggctcgagatgaccgagtacaagcccacggtgcgcctcgccacccgcgacgacgtccccagggccgtacgcaccctcgccgccgcgttcgccgactaccccgccacgcgccacaccgtcgatccggaccgccacatcgagcgggtcaccgagctgcaagaactcttcctcacgcgcgtcgggctcgacatcggcaaggtgtgggtcgcggacgacggcgccgcggtggcggtctggaccacgccggagagcgtcgaagcgggggcggtgttcgccgagatcggcccgcgcatggccgagttgagcggttcccggctggccgcgcagcaacagatggaaggcctcctggcgccgcaccggcccaaggagcccgcgtggttcctggccaccgtcggagtctcgcccgaccaccagggcaagggtctgggcagcgccgtcgtgctccccggagtggaggcggccgagcgcgccggggtgcccgccttcctggagacctccgcgccccgcaacctccccttctacgagcggctcggcttcaccgtcaccgccgacgtcgaggtgcccgaaggaccgcgcacctggtgcatgacccgcaagcccggtgccggcagtggagagggcagaggaagtctgctaacatgcggtgacgtcgaggagaatcctggcccagtgagcaagggcgaggagctgttcaccggggtggtgcccatcctggtcgagctggacggcgacgtaaacggccacaagttcagcgtgtccggcgagggcgagggcgatgccacctacggcaagctgaccctgaagttcatctgcaccaccggcaagctgcccgtgccctggcccaccctcgtgaccaccctgacctacggcgtgcagtgcttcagccgctaccccgaccacatgaagcagcacgacttcttcaagtccgccatgcccgaaggctacgtccaggagcgcaccatcttcttcaaggacgacggcaactacaagacccgcgccgaggtgaagttcgagggcgacaccctggtgaaccgcatcgagctgaagggcatcgacttcaaggaggacggcaacatcctggggcacaagctggagtacaactacaacagccacaacgtctatatcatggccgacaagcagaagaacggcatcaaggtgaacttcaagatccgccacaacatcgaggacggcagcgtgcagctcgccgaccactaccagcagaacacccccatcggcgacggccccgtgctgctgcccgacaaccactacctgagcacccagtgcgccctgagcaaagaccccaacgagaagcgcgatcacatggtcctgctggagttcgtgaccgccgccgggatcactctcggcatggacgagctgtacaaggaattctaactagagctcgctgatcagcctcgactgtgccttctagttgccagccatctgttgtttgcccctcccccgtgccttccttgaccctggaaggtgccactcccactgtcctttcctaataaaatgaggaaattgcatcgcattgtctgagtaggtgtcattctattctggggggtggggtggggcaggacagcaagggggaggattgggaagagaatagcaggcatgctggggatcgaagacacagtcggctggtttttttgtttttagcgttataacttttatttcactatgtcactgtatggttgcattttatgtcagtgaatggttgcaggttttttgtaagttattgatatgcctatccagtgtatgtcacgctttgcttgcagcgacaggtaccgagctcgaattcactggccgtcgttttacaacgtcgtgactgggaaaaccctggcgttacccaacttaatcgccttgcagcacatccccctttcgccagctggcgtaatagcgaagaggcccgcaccgatcgcccttcccaacagttgcgcagcctgaatggcgaatggcgcctgatgcggtattttctccttacgcatctgtgcggtatttcacaccgcatatggtgcactctcagtacaatctgctctgatgccgcatagttaagccagccccgacacccgccaacacccgctgacgcgccctgacgggcttgtctgctcccggcatccgcttacagacaagctgtgaccgtctccgggagctgcatgtgtcagaggttttcaccgtcatcaccgaaacgcgcgagacgaaagggcctcgtgatacgcctatttttataggttaatgtcatgataataatggtttcttagacgtcaggtggcacttttcggggaaatgtgcgcggaacccctatttgtttatttttctaaatacattcaaatatgtatccgctcatgagacaataaccctgataaatgcttcaataatattgaaaaaggaagagtatgagtattcaacatttccgtgtcgcccttattcccttttttgcggcattttgccttcctgtttttgctcacccagaaacgctggtgaaagtaaaagatgctgaagatcagttgggtgcacgagtgggttacatcgaactggatctcaacagcggtaagatccttgagagttttcgccccgaagaacgttttccaatgatgagcacttttaaagttctgctatgtggcgcggtattatcccgtattgacgccgggcaagagcaactcggtcgccgcatacactattctcagaatgacttggttgagtactcaccagtcacagaaaagcatcttacggatggcatgacagtaagagaattatgcagtgctgccataaccatgagtgataacactgcggccaacttacttctgacaacgatcg

SEQ ID NO: 42 - DNA, 4816 bp, synthetic construct
  source 1..4816: mol_type = other DNA
actcatatatactttagattgatttaaaacttcatttttaatttaaaaggatctaggtgaagatcctttttgataatctcatgaccaaaatcccttaacgtgagttttcgttccactgagcgtcagaccccgtagaaaagatcaaaggatcttcttgagatcctttttttctgcgcgtaatctgctgcttgcaaacaaaaaaaccaccgctaccagcggtggtttgtttgccggatcaagagctaccaactctttttccgaaggtaactggcttcagcagagcgcagataccaaatactgttcttctagtgtagccgtagttaggccaccacttcaagaactctgtagcaccgcctacatacctcgctctgctaatcctgttaccagtggctgctgccagtggcgataagtcgtgtcttaccgggttggactcaagacgatagttaccggataaggcgcagcggtcgggctgaacggggggttcgtgcacacagcccagcttggagcgaacgacctacaccgaactgagatacctacagcgtgagctatgagaaagcgccacgcttcccgaagggagaaaggcggacaggtatccggtaagcggcagggtcggaacaggagagcgcacgagggagcttccagggggaaacgcctggtatctttatagtcctgtcgggtttcgccacctctgacttgagcgtcgatttttgtgatgctcgtcaggggggcggagcctatggaaaaacgccagcaacgcggcctttttacggttcctggccttttgctggccttttgctcacatgttctttcctgcgttatcccctgattctgtggataaccgtattaccgcctttgagtgagctgataccgctcgccgcagccgaacgaccgagcgcagcgagtcagtgagcgaggaagcggaagagcgcccaatacgcaaaccgcctctccccgcgcgttggccgattcattaatgcagctggcacgacaggtttcccgactggaaagcgggcagtgagcgcaacgcaattaatgtgagttagctcactcattaggcaccccaggctttacactttatgcttccggctcgtatgttgtgtggaattgtgagcggataacaatttcacacaggaaacagctatgaccatgattacgccaacgtttaataaataataaataataaaataaaaaataaaaaataaataagatacattgatgagtttggacaaaccacaactagaatgcagtgaaaaaaatgctttatttgtgaaatttgtgatgctattgctttatttgtaaccattataagctgcaataaacaagttaagctttgtcgctgcaaccatagtttgacataatgcaaccataccttgacataattaaagtcatactctgacataaagcccccactggattgtacagaaatggagtctacaggccctgacctcttctcttcctcccacagggcctcgagagatctggcagcggagagggcagaggaagtctgctaacatgcggtgacgtcgaggagaatcctggccctaggctcgagatgaccgagtacaagcccacggtgcgcctcgccacccgcgacgacgtccccagggccgtacgcaccctcgccgccgcgttcgccgactaccccgccacgcgccacaccgtcgatccggaccgccacatcgagcgggtcaccgagctgcaagaactcttcctcacgcgcgtcgggctcgacatcggcaaggtgtgggtcgcggacgacggcgccgcggtggcggtctggaccacgccggagagcgtcgaagcgggggcggtgttcgccgagatcggcccgcgcatggccgagttgagcggttcccggctggccgcgcagcaacagatggaaggcctcctggcgccgcaccggcccaaggagcccgcgtggttcctggccaccgtcggagtctcgcccgaccaccagggcaagggtctgggcagcgccgtcgtgctccccggagtggaggcggccgagcgcgccggggtgcccgccttcctggagacctccgcgccccgcaacctccccttctacgagcggctcggcttcaccgtcaccgccgacgtcgaggtgcccgaaggaccgcgcacctggtgcatgacccgcaagcccggtgccggcagtggagagggcagaggaagtctgctaacatgcggtgacgtcgaggagaatcctggcccagtgagcaagggcgaggagctgttcaccggggtggtgcccatcctggtcgagctggacggcgacgtaaacggccacaagttcagcgtgtccggcgagggcgagggcgatgccacctacggcaagctgaccctgaagttcatctgcaccaccggcaagctgcccgtgccctggcccaccctcgtgaccaccctgacctacggcgtgcagtgcttcagccgctaccccgaccacatgaagcagcacgacttcttcaagtccgccatgcccgaaggctacgtccaggagcgcaccatcttcttcaaggacgacggcaactacaagacccgcgccgaggtgaagttcgagggcgacaccctggtgaaccgcatcgagctgaagggcatcgacttcaaggaggacggcaacatcctggggcacaagctggagtacaactacaacagccacaacgtctatatcatggccgacaagcagaagaacggcatcaaggtgaacttcaagatccgccacaacatcgaggacggcagcgtgcagctcgccgaccactaccagcagaacacccccatcggcgacggccccgtgctgctgcccgacaaccactacctgagcacccagtgcgccctgagcaaagaccccaacgagaagcgcgatcacatggtcctgctggagttcgtgaccgccgccgggatcactctcggcatggacgagctgtacaaggaattctaactagagctcgctgatcagcctcgactgtgccttctagttgccagccatctgttgtttgcccctcccccgtgccttccttgaccctggaaggtgccactcccactgtcctttcctaataaaatgaggaaattgcatcgcattgtctgagtaggtgtcattctattctggggggtggggtggggcaggacagcaagggggaggattgggaagagaatagcaggcatgctggggatcgaagacacagtcggctggtttttttgtttttagcgttataacttttatttcactatgtcactgtatggttgcattttatgtcagtgaatggttgcaggttttttgtaagttattgatatgcctatccagtgtatgtcacgctttgcttgcagcgacaggtaccgagctcgaattcactggccgtcgttttacaacgtcgtgactgggaaaaccctggcgttacccaacttaatcgccttgcagcacatccccctttcgccagctggcgtaatagcgaagaggcccgcaccgatcgcccttcccaacagttgcgcagcctgaatggcgaatggcgcctgatgcggtattttctccttacgcatctgtgcggtatttcacaccgcatatggtgcactctcagtacaatctgctctgatgccgcatagttaagccagccccgacacccgccaacacccgctgacgcgccctgacgggcttgtctgctcccggcatccgcttacagacaagctgtgaccgtctccgggagctgcatgtgtcagaggttttcaccgtcatcaccgaaacgcgcgagacgaaagggcctcgtgatacgcctatttttataggttaatgtcatgataataatggtttcttagacgtcaggtggcacttttcggggaaatgtgcgcggaacccctatttgtttatttttctaaatacattcaaatatgtatccgctcatgagacaataaccctgataaatgcttcaataatattgaaaaaggaagagtatgagtattcaacatttccgtgtcgcccttattcccttttttgcggcattttgccttcctgtttttgctcacccagaaacgctggtgaaagtaaaagatgctgaagatcagttgggtgcacgagtgggttacatcgaactggatctcaacagcggtaagatccttgagagttttcgccccgaagaacgttttccaatgatgagcacttttaaagttctgctatgtggcgcggtattatcccgtattgacgccgggcaagagcaactcggtcgccgcatacactattctcagaatgacttggttgagtactcaccagtcacagaaaagcatcttacggatggcatgacagtaagagaattatgcagtgctgccataaccatgagtgataacactgcggccaacttacttctgacaacgatcggaggaccgaaggagctaaccgcttttttgcacaacatgggggatcatgtaactcgccttgatcgttgggaaccggagctgaatgaagccataccaaacgacgagcgtgacaccacgatgcctgtagcaatggcaacaacgttgcgcaaactattaactggcgaactacttactctagcttcccggcaacaattaatagactggatggaggcggataaagttgcaggaccacttctgcgctcggcccttccggctggctggtttattgctgataaatctggagccggtgagcgtgggtctcgcggtatcattgcagcactggggccagatggtaagccctcccgtatcgtagttatctacacgacggggagtcaggcaactatggatgaacgaaatagacagatcgctgagataggtgcctcactgattaagcattggtaactgtcagaccaagttt

SEQ ID NO: 43 - DNA, 4872 bp, synthetic construct
  source 1..4872: mol_type = other DNA
aaaatcccttaacgtgagttttcgttccactgagcgtcagaccccgtagaaaagatcaaaggatcttcttgagatcctttttttctgcgcgtaatctgctgcttgcaaacaaaaaaaccaccgctaccagcggtggtttgtttgccggatcaagagctaccaactctttttccgaaggtaactggcttcagcagagcgcagataccaaatactgttcttctagtgtagccgtagttaggccaccacttcaagaactctgtagcaccgcctacatacctcgctctgctaatcctgttaccagtggctgctgccagtggcgataagtcgtgtcttaccgggttggactcaagacgatagttaccggataaggcgcagcggtcgggctgaacggggggttcgtgcacacagcccagcttggagcgaacgacctacaccgaactgagatacctacagcgtgagctatgagaaagcgccacgcttcccgaagggagaaaggcggacaggtatccggtaagcggcagggtcggaacaggagagcgcacgagggagcttccagggggaaacgcctggtatctttatagtcctgtcgggtttcgccacctctgacttgagcgtcgatttttgtgatgctcgtcaggggggcggagcctatggaaaaacgccagcaacgcggcctttttacggttcctggccttttgctggccttttgctcacatgttctttcctgcgttatcccctgattctgtggataaccgtattaccgcctttgagtgagctgataccgctcgccgcagccgaacgaccgagcgcagcgagtcagtgagcgaggaagcggaagagcgcccaatacgcaaaccgcctctccccgcgcgttggccgattcattaatgcagctggcacgacaggtttcccgactggaaagcgggcagtgagcgcaacgcaattaatgtgagttagctcactcattaggcaccccaggctttacactttatgcttccggctcgtatgttgtgtggaattgtgagcggataacaatttcacacaggaaacagctatgaccatgattacgccaacgtttaataaataataaataataaaataaaaaataaaaaataaataagatacattgatgagtttggacaaaccacaactagaatgcagtgaaaaaaatgctttatttgtgaaatttgtgatgctattgctttatttgtaaccattataagctgcaataaacaagttaagctttgtcgctgcaaccatagtttgacataatgcaaccataccttgacataattaaagtcatactctgacataaagcccccactggattgtacaattacgatcagcatgctcgaactgcttactggctttaagtttgtacaaaaaagaggcacctgcatgaaaatcagactgacctcttctcttcctcccacagggcctcgagagatctggcagcggagagggcagaggaagtctgctaacatgcggtgacgtcgaggagaatcctggccctaggctcgagatgaccgagtacaagcccacggtgcgcctcgccacccgcgacgacgtccccagggccgtacgcaccctcgccgccgcgttcgccgactaccccgccacgcgccacaccgtcgatccggaccgccacatcgagcgggtcaccgagctgcaagaactcttcctcacgcgcgtcgggctcgacatcggcaaggtgtgggtcgcggacgacggcgccgcggtggcggtctggaccacgccggagagcgtcgaagcgggggcggtgttcgccgagatcggcccgcgcatggccgagttgagcggttcccggctggccgcgcagcaacagatggaaggcctcctggcgccgcaccggcccaaggagcccgcgtggttcctggccaccgtcggagtctcgcccgaccaccagggcaagggtctgggcagcgccgtcgtgctccccggagtggaggcggccgagcgcgccggggtgcccgccttcctggagacctccgcgccccgcaacctccccttctacgagcggctcggcttcaccgtcaccgccgacgtcgaggtgcccgaaggaccgcgcacctggtgcatgacccgcaagcccggtgccggcagtggagagggcagaggaagtctgctaacatgcggtgacgtcgaggagaatcctggcccagtgagcaagggcgaggagctgttcaccggggtggtgcccatcctggtcgagctggacggcgacgtaaacggccacaagttcagcgtgtccggcgagggcgagggcgatgccacctacggcaagctgaccctgaagttcatctgcaccaccggcaagctgcccgtgccctggcccaccctcgtgaccaccctgacctacggcgtgcagtgcttcagccgctaccccgaccacatgaagcagcacgacttcttcaagtccgccatgcccgaaggctacgtccaggagcgcaccatcttcttcaaggacgacggcaactacaagacccgcgccgaggtgaagttcgagggcgacaccctggtgaaccgcatcgagctgaagggcatcgacttcaaggaggacggcaacatcctggggcacaagctggagtacaactacaacagccacaacgtctatatcatggccgacaagcagaagaacggcatcaaggtgaacttcaagatccgccacaacatcgaggacggcagcgtgcagctcgccgaccactaccagcagaacacccccatcggcgacggccccgtgctgctgcccgacaaccactacctgagcacccagtgcgccctgagcaaagaccccaacgagaagcgcgatcacatggtcctgctggagttcgtgaccgccgccgggatcactctcggcatggacgagctgtacaaggaattctaactagagctcgctgatcagcctcgactgtgccttctagttgccagccatctgttgtttgcccctcccccgtgccttccttgaccctggaaggtgccactcccactgtcctttcctaataaaatgaggaaattgcatcgcattgtctgagtaggtgtcattctattctggggggtggggtggggcaggacagcaagggggaggattgggaagagaatagcaggcatgctggggatcgaagacacagtcggctggtttttttgtttttagcgttataacttttatttcactatgtcactgtatggttgcattttatgtcagtgaatggttgcaggttttttgtaagttattgatatgcctatccagtgtatgtcacgctttgcttgcagcgacaggtaccgagctcgaattcactggccgtcgttttacaacgtcgtgactgggaaaaccctggcgttacccaacttaatcgccttgcagcacatccccctttcgccagctggcgtaatagcgaagaggcccgcaccgatcgcccttcccaacagttgcgcagcctgaatggcgaatggcgcctgatgcggtattttctccttacgcatctgtgcggtatttcacaccgcatatggtgcactctcagtacaatctgctctgatgccgcatagttaagccagccccgacacccgccaacacccgctgacgcgccctgacgggcttgtctgctcccggcatccgcttacagacaagctgtgaccgtctccgggagctgcatgtgtcagaggttttcaccgtcatcaccgaaacgcgcgagacgaaagggcctcgtgatacgcctatttttataggttaatgtcatgataataatggtttcttagacgtcaggtggcacttttcggggaaatgtgcgcggaacccctatttgtttatttttctaaatacattcaaatatgtatccgctcatgagacaataaccctgataaatgcttcaataatattgaaaaaggaagagtatgagtattcaacatttccgtgtcgcccttattcccttttttgcggcattttgccttcctgtttttgctcacccagaaacgctggtgaaagtaaaagatgctgaagatcagttgggtgcacgagtgggttacatcgaactggatctcaacagcggtaagatccttgagagttttcgccccgaagaacgttttccaatgatgagcacttttaaagttctgctatgtggcgcggtattatcccgtattgacgccgggcaagagcaactcggtcgccgcatacactattctcagaatgacttggttgagtactcaccagtcacagaaaagcatcttacggatggcatgacagtaagagaattatgcagtgctgccataaccatgagtgataacactgcggccaacttacttctgacaacgatcggaggaccgaaggagctaaccgcttttttgcacaacatgggggatcatgtaactcgccttgatcgttgggaaccggagctgaatgaagccataccaaacgacgagcgtgacaccacgatgcctgtagcaatggcaacaacgttgcgcaaactattaactggcgaactacttactctagcttcccggcaacaattaatagactggatggaggcggataaagttgcaggaccacttctgcgctcggcccttccggctggctggtttattgctgataaatctggagccggtgagcgtgggtctcgcggtatcattgcagcactggggccagatggtaagccctcccgtatcgtagttatctacacgacggggagtcaggcaactatggatgaacgaaatagacagatcgctgagataggtgcctcactgattaagcattggtaactgtcagaccaagtttactcatatatactttagattgatttaaaacttcatttttaatttaaaaggatctaggtgaagatcctttttgataatctcatgacc

SEQ ID NO: 44 - DNA, 4874 bp, synthetic construct
  source 1..4874: mol_type = other DNA
cagatggtaagccctcccgtatcgtagttatctacacgacggggagtcaggcaactatggatgaacgaaatagacagatcgctgagataggtgcctcactgattaagcattggtaactgtcagaccaagtttactcatatatactttagattgatttaaaacttcatttttaatttaaaaggatctaggtgaagatcctttttgataatctcatgaccaaaatcccttaacgtgagttttcgttccactgagcgtcagaccccgtagaaaagatcaaaggatcttcttgagatcctttttttctgcgcgtaatctgctgcttgcaaacaaaaaaaccaccgctaccagcggtggtttgtttgccggatcaagagctaccaactctttttccgaaggtaactggcttcagcagagcgcagataccaaatactgttcttctagtgtagccgtagttaggccaccacttcaagaactctgtagcaccgcctacatacctcgctctgctaatcctgttaccagtggctgctgccagtggcgataagtcgtgtcttaccgggttggactcaagacgatagttaccggataaggcgcagcggtcgggctgaacggggggttcgtgcacacagcccagcttggagcgaacgacctacaccgaactgagatacctacagcgtgagctatgagaaagcgccacgcttcccgaagggagaaaggcggacaggtatccggtaagcggcagggtcggaacaggagagcgcacgagggagcttccagggggaaacgcctggtatctttatagtcctgtcgggtttcgccacctctgacttgagcgtcgatttttgtgatgctcgtcaggggggcggagcctatggaaaaacgccagcaacgcggcctttttacggttcctggccttttgctggccttttgctcacatgttctttcctgcgttatcccctgattctgtggataaccgtattaccgcctttgagtgagctgataccgctcgccgcagccgaacgaccgagcgcagcgagtcagtgagcgaggaagcggaagagcgcccaatacgcaaaccgcctctccccgcgcgttggccgattcattaatgcagctggcacgacaggtttcccgactggaaagcgggcagtgagcgcaacgcaattaatgtgagttagctcactcattaggcaccccaggctttacactttatgcttccggctcgtatgttgtgtggaattgtgagcggataacaatttcacacaggaaacagctatgaccatgattacgccaacgtttaataaataataaataataaaataaaaaataaaaaataaataagatacattgatgagtttggacaaaccacaactagaatgcagtgaaaaaaatgctttatttgtgaaatttgtgatgctattgctttatttgtaaccattataagctgcaataaacaagttaagctttgtcgctgcaaccatagtttgacataatgcaaccataccttgacataattaaagtcatactctgacataaagcccccactggattgtacaattacgatcagcatgctcgaactgcttactggctttaagtttgtacaaaaaagagggagtgtgtattaagtaggtgcctgacctcttctcttcctcccacagggcctcgagagatctggcagcggagagggcagaggaagtctgctaacatgcggtgacgtcgaggagaatcctggccctaggctcgagatgaccgagtacaagcccacggtgcgcctcgccacccgcgacgacgtccccagggccgtacgcaccctcgccgccgcgttcgccgactaccccgccacgcgccacaccgtcgatccggaccgccacatcgagcgggtcaccgagctgcaagaactcttcctcacgcgcgtcgggctcgacatcggcaaggtgtgggtcgcggacgacggcgccgcggtggcggtctggaccacgccggagagcgtcgaagcgggggcggtgttcgccgagatcggcccgcgcatggccgagttgagcggttcccggctggccgcgcagcaacagatggaaggcctcctggcgccgcaccggcccaaggagcccgcgtggttcctggccaccgtcggagtctcgcccgaccaccagggcaagggtctgggcagcgccgtcgtgctccccggagtggaggcggccgagcgcgccggggtgcccgccttcctggagacctccgcgccccgcaacctccccttctacgagcggctcggcttcaccgtcaccgccgacgtcgaggtgcccgaaggaccgcgcacctggtgcatgacccgcaagcccggtgccggcagtggagagggcagaggaagtctgctaacatgcggtgacgtcgaggagaatcctggcccagtgagcaagggcgaggagctgttcaccggggtggtgcccatcctggtcgagctggacggcgacgtaaacggccacaagttcagcgtgtccggcgagggcgagggcgatgccacctacggcaagctgaccctgaagttcatctgcaccaccggcaagctgcccgtgccctggcccaccctcgtgaccaccctgacctacggcgtgcagtgcttcagccgctaccccgaccacatgaagcagcacgacttcttcaagtccgccatgcccgaaggctacgtccaggagcgcaccatcttcttcaaggacgacggcaactacaagacccgcgccgaggtgaagttcgagggcgacaccctggtgaaccgcatcgagctgaagggcatcgacttcaaggaggacggcaacatcctggggcacaagctggagtacaactacaacagccacaacgtctatatcatggccgacaagcagaagaacggcatcaaggtgaacttcaagatccgccacaacatcgaggacggcagcgtgcagctcgccgaccactaccagcagaacacccccatcggcgacggccccgtgctgctgcccgacaaccactacctgagcacccagtgcgccctgagcaaagaccccaacgagaagcgcgatcacatggtcctgctggagttcgtgaccgccgccgggatcactctcggcatggacgagctgtacaaggaattctaactagagctcgctgatcagcctcgactgtgccttttagttgccagccatctgttgtttgcccctcccccgtgccttccttgaccctggaaggtgccactcccactgtcctttcctaataaaatgaggaaattgcatcgcattgtctgagtaggtgtcattctattctggggggtggggtggggcaggacagcaagggggaggattgggaagagaatagcaggcatgctggggatcgaagacacagtcggctggtttttttgtttttagcgttataacttttatttcactatgtcactgtatggttgcattttatgtcagtgaatggttgcaggttttttgtaagttattgatatgcctatccagtgtatgtcacgctttgcttgcagcgacaggtaccgagctcgaattcactggccgtcgttttacaacgtcgtgactgggaaaaccctggcgttacccaacttaatcgccttgcagcacatccccctttcgccagctggcgtaatagcgaagaggcccgcaccgatcgcccttcccaacagttgcgcagcctgaatggcgaatggcgcctgatgcggtattttctccttacgcatctgtgcggtatttcacaccgcatatggtgcactctcagtacaatctgctctgatgccgcatagttaagccagccccgacacccgccaacacccgctgacgcgccctgacgggcttgtctgctcccggcatccgcttacagacaagctgtgaccgtctccgggagctgcatgtgtcagaggttttcaccgtcatcaccgaaacgcgcgagacgaaagggcctcgtgatacgcctatttttataggttaatgtcatgataataatggtttcttagacgtcaggtggcacttttcggggaaatgtgcgcggaacccctatttgtttatttttctaaatacattcaaatatgtatccgctcatgagacaataaccctgataaatgcttcaataatattgaaaaaggaagagtatgagtattcaacatttccgtgtcgcccttattcccttttttgcggcattttgccttcctgtttttgctcacccagaaacgctggtgaaagtaaaagatgctgaagatcagttgggtgcacgagtgggttacatcgaactggatctcaacagcggtaagatccttgagagttttcgccccgaagaacgttttccaatgatgagcacttttaaagttctgctatgtggcgcggtattatcccgtattgacgccgggcaagagcaactcggtcgccgcatacactattctcagaatgacttggttgagtactcaccagtcacagaaaagcatcttacggatggcatgacagtaagagaattatgcagtgctgccataaccatgagtgataacactgcggccaacttacttctgacaacgatcggaggaccgaaggagctaaccgcttttttgcacaacatgggggatcatgtaactcgccttgatcgttgggaaccggagctgaatgaagccataccaaacgacgagcgtgacaccacgatgcctgtagcaatggcaacaacgttgcgcaaactattaactggcgaactacttactctagcttcccggcaacaattaatagactggatggaggcggataaagttgcaggaccacttctgcgctcggcccttccggctggctggtttattgctgataaatctggagccggtgagcgtgggtctcgcggtatcattgcagcactggggc

SEQ ID NO: 45 - DNA, 4876 bp, synthetic construct
  source 1..4876: mol_type = other DNA
agcgtgacaccacgatgcctgtagcaatggcaacaacgttgcgcaaactattaactggcgaactacttactctagcttcccggcaacaattaatagactggatggaggcggataaagttgcaggaccacttctgcgctcggcccttccggctggctggtttattgctgataaatctggagccggtgagcgtgggtctcgcggtatcattgcagcactggggccagatggtaagccctcccgtatcgtagttatctacacgacggggagtcaggcaactatggatgaacgaaatagacagatcgctgagataggtgcctcactgattaagcattggtaactgtcagaccaagtttactcatatatactttagattgatttaaaacttcatttttaatttaaaaggatctaggtgaagatcctttttgataatctcatgaccaaaatcccttaacgtgagttttcgttccactgagcgtcagaccccgtagaaaagatcaaaggatcttcttgagatcctttttttctgcgcgtaatctgctgcttgcaaacaaaaaaaccaccgctaccagcggtggtttgtttgccggatcaagagctaccaactctttttccgaaggtaactggcttcagcagagcgcagataccaaatactgttcttctagtgtagccgtagttaggccaccacttcaagaactctgtagcaccgcctacatacctcgctctgctaatcctgttaccagtggctgctgccagtggcgataagtcgtgtcttaccgggttggactcaagacgatagttaccggataaggcgcagcggtcgggctgaacggggggttcgtgcacacagcccagcttggagcgaacgacctacaccgaactgagatacctacagcgtgagctatgagaaagcgccacgcttcccgaagggagaaaggcggacaggtatccggtaagcggcagggtcggaacaggagagcgcacgagggagcttccagggggaaacgcctggtatctttatagtcctgtcgggtttcgccacctctgacttgagcgtcgatttttgtgatgctcgtcaggggggcggagcctatggaaaaacgccagcaacgcggcctttttacggttcctggccttttgctggccttttgctcacatgttctttcctgcgttatcccctgattctgtggataaccgtattaccgcctttgagtgagctgataccgctcgccgcagccgaacgaccgagcgcagcgagtcagtgagcgaggaagcggaagagcgcccaatacgcaaaccgcctctccccgcgcgttggccgattcattaatgcagctggcacgacaggtttcccgactggaaagcgggcagtgagcgcaacgcaattaatgtgagttagctcactcattaggcaccccaggctttacactttatgcttccggctcgtatgttgtgtggaattgtgagcggataacaatttcacacaggaaacagctatgaccatgattacgccaacgtttaataaataataaataataaaataaaaaataaaaaataaataagatacattgatgagtttggacaaaccacaactagaatgcagtgaaaaaaatgctttatttgtgaaatttgtgatgctattgctttatttgtaaccattataagctgcaataaacaagttaagctttgtcgctgcaaccatagtttgacataatgcaaccataccttgacataattaaagtcatactctgacataaagcccccactggattgtacaattacgatcagcatgctcgaactgcttactggctttaagtttgtacaaaaaagaggatccccaagaccccagcacacttctgacctcttctcttcctcccacagggcctcgagagatctggcagcggagagggcagaggaagtctgctaacatgcggtgacgtcgaggagaatcctggccctaggctcgagatgaccgagtacaagcccacggtgcgcctcgccacccgcgacgacgtccccagggccgtacgcaccctcgccgccgcgttcgccgactaccccgccacgcgccacaccgtcgatccggaccgccacatcgagcgggtcaccgagctgcaagaactcttcctcacgcgcgtcgggctcgacatcggcaaggtgtgggtcgcggacgacggcgccgcggtggcggtctggaccacgccggagagcgtcgaagcgggggcggtgttcgccgagatcggcccgcgcatggccgagttgagcggttcccggctggccgcgcagcaacagatggaaggcctcctggcgccgcaccggcccaaggagcccgcgtggttcctggccaccgtcggagtctcgcccgaccaccagggcaagggtctgggcagcgccgtcgtgctccccggagtggaggcggccgagcgcgccggggtgcccgccttcctggagacctccgcgccccgcaacctccccttctacgagcggctcggcttcaccgtcaccgccgacgtcgaggtgcccgaaggaccgcgcacctggtgcatgacccgcaagcccggtgccggcagtggagagggcagaggaagtctgctaacatgcggtgacgtcgaggagaatcctggcccagtgagcaagggcgaggagctgttcaccggggtggtgcccatcctggtcgagctggacggcgacgtaaacggccacaagttcagcgtgtccggcgagggcgagggcgatgccacctacggcaagctgaccctgaagttcatctgcaccaccggcaagctgcccgtgccctggcccaccctcgtgaccaccctgacctacggcgtgcagtgcttcagccgctaccccgaccacatgaagcagcacgacttcttcaagtccgccatgcccgaaggctacgtccaggagcgcaccatcttcttcaaggacgacggcaactacaagacccgcgccgaggtgaagttcgagggcgacaccctggtgaaccgcatcgagctgaagggcatcgacttcaaggaggacggcaacatcctggggcacaagctggagtacaactacaacagccacaacgtctatatcatggccgacaagcagaagaacggcatcaaggtgaacttcaagatccgccacaacatcgaggacggcagcgtgcagctcgccgaccactaccagcagaacacccccatcggcgacggccccgtgctgctgcccgacaaccactacctgagcacccagtgcgccctgagcaaagaccccaacgagaagcgcgatcacatggtcctgctggagttcgtgaccgccgccgggatcactctcggcatggacgagctgtacaaggaattctaactagagctcgctgatcagcctcgactgtgccttctagttgccagccatctgttgtttgcccctcccccgtgccttccttgaccctggaaggtgccactcccactgtcctttcctaataaaatgaggaaattgcatcgcattgtctgagtaggtgtcattctattctggggggtggggtggggcaggacagcaagggggaggattgggaagagaatagcaggcatgctggggatcgaagacacagtcggctggtttttttgtttttagcgttataacttttatttcactatgtcactgtatggttgcattttatgtcagtgaatggttgcaggttttttgtaagttattgatatgcctatccagtgtatgtcacgctttgcttgcagcgacaggtaccgagctcgaattcactggccgtcgttttacaacgtcgtgactgggaaaaccctggcgttacccaacttaatcgccttgcagcacatccccctttcgccagctggcgtaatagcgaagaggcccgcaccgatcgcccttcccaacagttgcgcagcctgaatggcgaatggcgcctgatgcggtattttctccttacgcatctgtgcggtatttcacaccgcatatggtgcactctcagtacaatctgctctgatgccgcatagttaagccagccccgacacccgccaacacccgctgacgcgccctgacgggcttgtctgctcccggcatccgcttacagacaagctgtgaccgtctccgggagctgcatgtgtcagaggttttcaccgtcatcaccgaaacgcgcgagacgaaagggcctcgtgatacgcctatttttataggttaatgtcatgataataatggtttcttagacgtcaggtggcacttttcggggaaatgtgcgcggaacccctatttgtttatttttctaaatacattcaaatatgtatccgctcatgagacaataaccctgataaatgcttcaataatattgaaaaaggaagagtatgagtattcaacatttccgtgtcgcccttattcccttttttgcggcattttgccttcctgtttttgctcacccagaaacgctggtgaaagtaaaagatgctgaagatcagttgggtgcacgagtgggttacatcgaactggatctcaacagcggtaagatccttgagagttttcgccccgaagaacgttttccaatgatgagcacttttaaagttctgctatgtggcgcggtattatcccgtattgacgccgggcaagagcaactcggtcgccgcatacactattctcagaatgacttggttgagtactcaccagtcacagaaaagcatcttacggatggcatgacagtaagagaattatgcagtgctgccataaccatgagtgataacactgcggccaacttacttctgacaacgatcggaggaccgaaggagctaaccgcttttttgcacaacatgggggatcatgtaactcgccttgatcgttgggaaccggagctgaatgaagccataccaaacgacg

SEQ ID NO: 46 - DNA, 4872 bp, synthetic construct
  source 1..4872: mol_type = other DNA
ttttgctcacccagaaacgctggtgaaagtaaaagatgctgaagatcagttgggtgcacgagtgggttacatcgaactggatctcaacagcggtaagatccttgagagttttcgccccgaagaacgttttccaatgatgagcacttttaaagttctgctatgtggcgcggtattatcccgtattgacgccgggcaagagcaactcggtcgccgcatacactattctcagaatgacttggttgagtactcaccagtcacagaaaagcatcttacggatggcatgacagtaagagaattatgcagtgctgccataaccatgagtgataacactgcggccaacttacttctgacaacgatcggaggaccgaaggagctaaccgcttttttgcacaacatgggggatcatgtaactcgccttgatcgttgggaaccggagctgaatgaagccataccaaacgacgagcgtgacaccacgatgcctgtagcaatggcaacaacgttgcgcaaactattaactggcgaactacttactctagcttcccggcaacaattaatagactggatggaggcggataaagttgcaggaccacttctgcgctcggcccttccggctggctggtttattgctgataaatctggagccggtgagcgtgggtctcgcggtatcattgcagcactggggccagatggtaagccctcccgtatcgtagttatctacacgacggggagtcaggcaactatggatgaacgaaatagacagatcgctgagataggtgcctcactgattaagcattggtaactgtcagaccaagtttactcatatatactttagattgatttaaaacttcatttttaatttaaaaggatctaggtgaagatcctttttgataatctcatgaccaaaatcccttaacgtgagttttcgttccactgagcgtcagaccccgtagaaaagatcaaaggatcttcttgagatcctttttttctgcgcgtaatctgctgcttgcaaacaaaaaaaccaccgctaccagcggtggtttgtttgccggatcaagagctaccaactctttttccgaaggtaactggcttcagcagagcgcagataccaaatactgttcttctagtgtagccgtagttaggccaccacttcaagaactctgtagcaccgcctacatacctcgctctgctaatcctgttaccagtggctgctgccagtggcgataagtcgtgtcttaccgggttggactcaagacgatagttaccggataaggcgcagcggtcgggctgaacggggggttcgtgcacacagcccagcttggagcgaacgacctacaccgaactgagatacctacagcgtgagctatgagaaagcgccacgcttcccgaagggagaaaggcggacaggtatccggtaagcggcagggtcggaacaggagagcgcacgagggagcttccagggggaaacgcctggtatctttatagtcctgtcgggtttcgccacctctgacttgagcgtcgatttttgtgatgctcgtcaggggggcggagcctatggaaaaacgccagcaacgcggcctttttacggttcctggccttttgctggccttttgctcacatgttctttcctgcgttatcccctgattctgtggataaccgtattaccgcctttgagtgagctgataccgctcgccgcagccgaacgaccgagcgcagcgagtcagtgagcgaggaagcggaagagcgcccaatacgcaaaccgcctctccccgcgcgttggccgattcattaatgcagctggcacgacaggtttcccgactggaaagcgggcagtgagcgcaacgcaattaatgtgagttagctcactcattaggcaccccaggctttacactttatgcttccggctcgtatgttgtgtggaattgtgagcggataacaatttcacacaggaaacagctatgaccatgattacgccaacgtttaataaataataaataataaaataaaaaataaaaaataaataagatacattgatgagtttggacaaaccacaactagaatgcagtgaaaaaaatgctttatttgtgaaatttgtgatgctattgctttatttgtaaccattataagctgcaataaacaagttaagctttgtcgctgcaaccatagtttgacataatgcaaccataccttgacataattaaagtcatactctgacataaagcccccactggattgtacaattacgatcagcatgctcgaactgcttactggctttaagtttgtacaaaaaagagctatccaggctgtgctatccctgacctcttctcttcctcccacagggcctcgagagatctggcagcggagagggcagaggaagtctgctaacatgcggtgacgtcgaggagaatcctggccctaggctcgagatgaccgagtacaagcccacggtgcgcctcgccacccgcgacgacgtccccagggccgtacgcaccctcgccgccgcgttcgccgactaccccgccacgcgccacaccgtcgatccggaccgccacatcgagcgggtcaccgagctgcaagaactcttcctcacgcgcgtcgggctcgacatcggcaaggtgtgggtcgcggacgacggcgccgcggtggcggtctggaccacgccggagagcgtcgaagcgggggcggtgttcgccgagatcggcccgcgcatggccgagttgagcggttcccggctggccgcgcagcaacagatggaaggcctcctggcgccgcaccggcccaaggagcccgcgtggttcctggccaccgtcggagtctcgcccgaccaccagggcaagggtctgggcagcgccgtcgtgctccccggagtggaggcggccgagcgcgccggggtgcccgccttcctggagacctccgcgccccgcaacctccccttctacgagcggctcggcttcaccgtcaccgccgacgtcgaggtgcccgaaggaccgcgcacctggtgcatgacccgcaagcccggtgccggcagtggagagggcagaggaagtctgctaacatgcggtgacgtcgaggagaatcctggcccagtgagcaagggcgaggagctgttcaccggggtggtgcccatcctggtcgagctggacggcgacgtaaacggccacaagttcagcgtgtccggcgagggcgagggcgatgccacctacggcaagctgaccctgaagttcatctgcaccaccggcaagctgcccgtgccctggcccaccctcgtgaccaccctgacctacggcgtgcagtgcttcagccgctaccccgaccacatgaagcagcacgacttcttcaagtccgccatgcccgaaggctacgtccaggagcgcaccatcttcttcaaggacgacggcaactacaagacccgcgccgaggtgaagttcgagggcgacaccctggtgaaccgcatcgagctgaagggcatcgacttcaaggaggacggcaacatcctggggcacaagctggagtacaactacaacagccacaacgtctatatcatggccgacaagcagaagaacggcatcaaggtgaacttcaagatccgccacaacatcgaggacggcagcgtgcagctcgccgaccactaccagcagaacacccccatcggcgacggccccgtgctgctgcccgacaaccactacctgagcacccagtgcgccctgagcaaagaccccaacgagaagcgcgatcacatggtcctgctggagttcgtgaccgccgccgggatcactctcggcatggacgagctgtacaaggaattctaactagagctcgctgatcagcctcgactgtgccttctagttgccagccatctgttgtttgcccctcccccgtgccttccttgaccctggaaggtgccactcccactgtcctttcctaataaaatgaggaaattgcatcgcattgtctgagtaggtgtcattctattctggggggtggggtggggcaggacagcaagggggaggattgggaagagaatagcaggcatgctggggatcgaagacacagtcggctggtttttttgtttttagcgttataacttttatttcactatgtcactgtatggttgcattttatgtcagtgaatggttgcaggttttttgtaagttattgatatgcctatccagtgtatgtcacgctttgcttgcagcgacaggtaccgagctcgaattcactggccgtcgttttacaacgtcgtgactgggaaaaccctggcgttacccaacttaatcgccttgcagcacatccccctttcgccagctggcgtaatagcgaagaggcccgcaccgatcgcccttcccaacagttgcgcagcctgaatggcgaatggcgcctgatgcggtattttctccttacgcatctgtgcggtatttcacaccgcatatggtgcactctcagtacaatctgctctgatgccgcatagttaagccagccccgacacccgccaacacccgctgacgcgccctgacgggcttgtctgctcccggcatccgcttacagacaagctgtgaccgtctccgggagctgcatgtgtcagaggttttcaccgtcatcaccgaaacgcgcgagacgaaagggcctcgtgatacgcctatttttataggttaatgtcatgataataatggtttcttagacgtcaggtggcacttttcggggaaatgtgcgcggaacccctatttgtttatttttctaaatacattcaaatatgtatccgctcatgagacaataaccctgataaatgcttcaataatattgaaaaaggaagagtatgagtattcaacatttccgtgtcgcccttattcccttttttgcggcattttgccttcctgt

SEQ ID NO: 47 - DNA, 4817 bp, synthetic construct
  source 1..4817: mol_type = other DNA
agttgcgcagcctgaatggcgaatggcgcctgatgcggtattttctccttacgcatctgtgcggtatttcacaccgcatatggtgcactctcagtacaatctgctctgatgccgcatagttaagccagccccgacacccgccaacacccgctgacgcgccctgacgggcttgtctgctcccggcatccgcttacagacaagctgtgaccgtctccgggagctgcatgtgtcagaggttttcaccgtcatcaccgaaacgcgcgagacgaaagggcctcgtgatacgcctatttttataggttaatgtcatgataataatggtttcttagacgtcaggtggcacttttcggggaaatgtgcgcggaacccctatttgtttatttttctaaatacattcaaatatgtatccgctcatgagacaataaccctgataaatgcttcaataatattgaaaaaggaagagtatgagtattcaacatttccgtgtcgcccttattcccttttttgcggcattttgccttcctgtttttgctcacccagaaacgctggtgaaagtaaaagatgctgaagatcagttgggtgcacgagtgggttacatcgaactggatctcaacagcggtaagatccttgagagttttcgccccgaagaacgttttccaatgatgagcacttttaaagttctgctatgtggcgcggtattatcccgtattgacgccgggcaagagcaactcggtcgccgcatacactattctcagaatgacttggttgagtactcaccagtcacagaaaagcatcttacggatggcatgacagtaagagaattatgcagtgctgccataaccatgagtgataacactgcggccaacttacttctgacaacgatcggaggaccgaaggagctaaccgcttttttgcacaacatgggggatcatgtaactcgccttgatcgttgggaaccggagctgaatgaagccataccaaacgacgagcgtgacaccacgatgcctgtagcaatggcaacaacgttgcgcaaactattaactggcgaactacttactctagcttcccggcaacaattaatagactggatggaggcggataaagttgcaggaccacttctgcgctcggcccttccggctggctggtttattgctgataaatctggagccggtgagcgtgggtctcgcggtatcattgcagcactggggccagatggtaagccctcccgtatcgtagttatctacacgacggggagtcaggcaactatggatgaacgaaatagacagatcgctgagataggtgcctcactgattaagcattggtaactgtcagaccaagtttactcatatatactttagattgatttaaaacttcatttttaatttaaaaggatctaggtgaagatcctttttgataatctcatgaccaaaatcccttaacgtgagttttcgttccactgagcgtcagaccccgtagaaaagatcaaaggatcttcttgagatcctttttttctgcgcgtaatctgctgcttgcaaacaaaaaaaccaccgctaccagcggtggtttgtttgccggatcaagagctaccaactctttttccgaaggtaactggcttcagcagagcgcagataccaaatactgttcttctagtgtagccgtagttaggccaccacttcaagaactctgtagcaccgcctacatacctcgctctgctaatcctgttaccagtggctgctgccagtggcgataagtcgtgtcttaccgggttggactcaagacgatagttaccggataaggcgcagcggtcgggctgaacggggggttcgtgcacacagcccagcttggagcgaacgacctacaccgaactgagatacctacagcgtgagctatgagaaagcgccacgcttcccgaagggagaaaggcggacaggtatccggtaagcggcagggtcggaacaggagagcgcacgagggagcttccagggggaaacgcctggtatctttatagtcctgtcgggtttcgccacctctgacttgagcgtcgatttttgtgatgctcgtcaggggggcggagcctatggaaaaacgccagcaacgcggcctttttacggttcctggccttttgctggccttttgctcacatgttctttcctgcgttatcccctgattctgtggataaccgtattaccgcctttgagtgagctgataccgctcgccgcagccgaacgaccgagcgcagcgagtcagtgagcgaggaagcggaagagcgcccaatacgcaaaccgcctctccccgcgcgttggccgattcattaatgcagctggcacgacaggtttcccgactggaaagcgggcagtgagcgcaacgcaattaatgtgagttagctcactcattaggcaccccaggctttacactttatgcttccggctcgtatgttgtgtggaattgtgagcggataacaatttcacacaggaaacagctatgaccatgattacgccaacgtttaataaataataaataataaaataaaaaataaaaaataaataagatacattgatgagtttggacaaaccacaactagaatgcagtgaaaaaaatgctttatttgtgaaatttgtgatgctattgctttatttgtaaccattataagctgcaataaacaagttaagctttgtcgctgcaaccatagtttgacataatgcaaccataccttgacataattaaagtcatactctgacataaagcccgatcgtgtcttccctttagggagcttaaattctacctgacctcttctcttcctcccacagggcctcgagagatctggcagcggagagggcagaggaagtctgctaacatgcggtgacgtcgaggagaatcctggccctaggctcgagatgaccgagtacaagcccacggtgcgcctcgccacccgcgacgacgtccccagggccgtacgcaccctcgccgccgcgttcgccgactaccccgccacgcgccacaccgtcgatccggaccgccacatcgagcgggtcaccgagctgcaagaactcttcctcacgcgcgtcgggctcgacatcggcaaggtgtgggtcgcggacgacggcgccgcggtggcggtctggaccacgccggagagcgtcgaagcgggggcggtgttcgccgagatcggcccgcgcatggccgagttgagcggttcccggctggccgcgcagcaacagatggaaggcctcctggcgccgcaccggcccaaggagcccgcgtggttcctggccaccgtcggagtctcgcccgaccaccagggcaagggtctgggcagcgccgtcgtgctccccggagtggaggcggccgagcgcgccggggtgcccgccttcctggagacctccgcgccccgcaacctccccttctacgagcggctcggcttcaccgtcaccgccgacgtcgaggtgcccgaaggaccgcgcacctggtgcatgacccgcaagcccggtgccggcagtggagagggcagaggaagtctgctaacatgcggtgacgtcgaggagaatcctggcccagtgagcaagggcgaggagctgttcaccggggtggtgcccatcctggtcgagctggacggcgacgtaaacggccacaagttcagcgtgtccggcgagggcgagggcgatgccacctacggcaagctgaccctgaagttcatctgcaccaccggcaagctgcccgtgccctggcccaccctcgtgaccaccctgacctacggcgtgcagtgcttcagccgctaccccgaccacatgaagcagcacgacttcttcaagtccgccatgcccgaaggctacgtccaggagcgcaccatcttcttcaaggacgacggcaactacaagacccgcgccgaggtgaagttcgagggcgacaccctggtgaaccgcatcgagctgaagggcatcgacttcaaggaggacggcaacatcctggggcacaagctggagtacaactacaacagccacaacgtctatatcatggccgacaagcagaagaacggcatcaaggtgaacttcaagatccgccacaacatcgaggacggcagcgtgcagctcgccgaccactaccagcagaacacccccatcggcgacggccccgtgctgctgcccgacaaccactacctgagcacccagtccgccctgagcaaagaccccaacgagaagcgcgatcacatggtcctgctggagttcgtgaccgccgccgggatcactctcggcatggacgagctgtacaaggaattctaactagagctcgctgatcagcctcgactgtgccttctagttgccagccatctgttgtttgcccctcccccgtgccttccttgaccctggaaggtgccactcccactgtcctttcctaataaaatgaggaaattgcatcgcattgtctgagtaggtgtcattctattctggggggtggggtggggcaggacagcaagggggaggattgggaagagaatagcaggcatgctggggatcgaagacacagtcggctggtttttttgtttttagcgttataacttttatttcactatgtcactgtatggttgcattttatgtcagtgaatggttgcaggttttttgtaagttattgatatgcctatccagtgtatgtcacgctttgcttgcagcgacaggtaccgagctcgaattcactggccgtcgttttacaacgtcgtgactgggaaaaccctggcgttacccaacttaatcgccttgcagcacatccccctttcgccagctggcgtaatagcgaagaggcccgcaccgatcgcccttcccaac

SEQ ID NO: 48 - DNA, 4818 bp, synthetic construct
  source 1..4818: mol_type = other DNA
agttgcgcagcctgaatggcgaatggcgcctgatgcggtattttctccttacgcatctgtgcggtatttcacaccgcatatggtgcactctcagtacaatctgctctgatgccgcatagttaagccagccccgacacccgccaacacccgctgacgcgccctgacgggcttgtctgctcccggcatccgcttacagacaagctgtgaccgtctccgggagctgcatgtgtcagaggttttcaccgtcatcaccgaaacgcgcgagacgaaagggcctcgtgatacgcctatttttataggttaatgtcatgataataatggtttcttagacgtcaggtggcacttttcggggaaatgtgcgcggaacccctatttgtttatttttctaaatacattcaaatatgtatccgctcatgagacaataaccctgataaatgcttcaataatattgaaaaaggaagagtatgagtattcaacatttccgtgtcgcccttattcccttttttgcggcattttgccttcctgtttttgctcacccagaaacgctggtgaaagtaaaagatgctgaagatcagttgggtgcacgagtgggttacatcgaactggatctcaacagcggtaagatccttgagagttttcgccccgaagaacgttttccaatgatgagcacttttaaagttctgctatgtggcgcggtattatcccgtattgacgccgggcaagagcaactcggtcgccgcatacactattctcagaatgacttggttgagtactcaccagtcacagaaaagcatcttacggatggcatgacagtaagagaattatgcagtgctgccataaccatgagtgataacactgcggccaacttacttctgacaacgatcggaggaccgaaggagctaaccgcttttttgcacaacatgggggatcatgtaactcgccttgatcgttgggaaccggagctgaatgaagccataccaaacgacgagcgtgacaccacgatgcctgtagcaatggcaacaacgttgcgcaaactattaactggcgaactacttactctagcttcccggcaacaattaatagactggatggaggcggataaagttgcaggaccacttctgcgctcggcccttccggctggctggtttattgctgataaatctggagccggtgagcgtgggtctcgcggtatcattgcagcactggggccagatggtaagccctcccgtatcgtagttatctacacgacggggagtcaggcaactatggatgaacgaaatagacagatcgctgagataggtgcctcactgattaagcattggtaactgtcagaccaagtttactcatatatactttagattgatttaaaacttcatttttaatttaaaaggatctaggtgaagatcctttttgataatctcatgaccaaaatcccttaacgtgagttttcgttccactgagcgtcagaccccgtagaaaagatcaaaggatcttcttgagatcctttttttctgcgcgtaatctgctgcttgcaaacaaaaaaaccaccgctaccagcggtggtttgtttgccggatcaagagctaccaactctttttccgaaggtaactggcttcagcagagcgcagataccaaatactgttcttctagtgtagccgtagttaggccaccacttcaagaactctgtagcaccgcctacatacctcgctctgctaatcctgttaccagtggctgctgccagtggcgataagtcgtgtcttaccgggttggactcaagacgatagttaccggataaggcgcagcggtcgggctgaacggggggttcgtgcacacagcccagcttggagcgaacgacctacaccgaactgagatacctacagcgtgagctatgagaaagcgccacgcttcccgaagggagaaaggcggacaggtatccggtaagcggcagggtcggaacaggagagcgcacgagggagcttccagggggaaacgcctggtatctttatagtcctgtcgggtttcgccacctctgacttgagcgtcgatttttgtgatgctcgtcaggggggcggagcctatggaaaaacgccagcaacgcggcctttttacggttcctggccttttgctggccttttgctcacatgttctttcctgcgttatcccctgattctgtggataaccgtattaccgcctttgagtgagctgataccgctcgccgcagccgaacgaccgagcgcagcgagtcagtgagcgaggaagcggaagagcgcccaatacgcaaaccgcctctccccgcgcgttggccgattcattaatgcagctggcacgacaggtttcccgactggaaagcgggcagtgagcgcaacgcaattaatgtgagttagctcactcattaggcaccccaggctttacactttatgcttccggctcgtatgttgtgtggaattgtgagcggataacaatttcacacaggaaacagctatgaccatgattacgccaacgtttaataaataataaataataaaataaaaaataaaaaataaataagatacattgatgagtttggacaaaccacaactagaatgcagtgaaaaaaatgctttatttgtgaaatttgtgatgctattgctttatttgtaaccattataagctgcaataaacaagttaagctttgtcgctgcaaccatagtttgacataatgcaaccataccttgacataattaaagtcatactctgacataaagcccgatcgtgtcttccatgcgacatcgaaccaaacacttctgacctcttctcttcctcccacagggcctcgagagatctggcagcggagagggcagaggaagtctgctaacatgcggtgacgtcgaggagaatcctggccctaggctcgagatgaccgagtacaagcccacggtgcgcctcgccacccgcgacgacgtccccagggccgtacgcaccctcgccgccgcgttcgccgactaccccgccacgcgccacaccgtcgatccggaccgccacatcgagcgggtcaccgagctgcaagaactcttcctcacgcgcgtcgggctcgacatcggcaaggtgtgggtcgcggacgacggcgccgcggtggcggtctggaccacgccggagagcgtcgaagcgggggcggtgttcgccgagatcggcccgcgcatggccgagttgagcggttcccggctggccgcgcagcaacagatggaaggcctcctggcgccgcaccggcccaaggagcccgcgtggttcctggccaccgtcggagtctcgcccgaccaccagggcaagggtctgggcagcgccgtcgtgctccccggagtggaggcggccgagcgcgccggggtgcccgccttcctggagacctccgcgccccgcaacctccccttctacgagcggctcggcttcaccgtcaccgccgacgtcgaggtgcccgaaggaccgcgcacctggtgcatgacccgcaagcccggtgccggcagtggagagggcagaggaagtctgctaacatgcggtgacgtcgaggagaatcctggcccagtgagcaagggcgaggagctgttcaccggggtggtgcccatcctggtcgagctggacggcgacgtaaacggccacaagttcagcgtgtccggcgagggcgagggcgatgccacctacggcaagctgaccctgaagttcatctgcaccaccggcaagctgcccgtgccctggcccaccctcgtgaccaccctgacctacggcgtgcagtgcttcagccgctaccccgaccacatgaagcagcacgacttcttcaagtccgccatgcccgaaggctacgtccaggagcgcaccatcttcttcaaggacgacggcaactacaagacccgcgccgaggtgaagttcgagggcgacaccctggtgaaccgcatcgagctgaagggcatcgacttcaaggaggacggcaacatcctggggcacaagctggagtacaactacaacagccacaacgtctatatcatggccgacaagcagaagaacggcatcaaggtgaacttcaagatccgccacaacatcgaggacggcagcgtgcagctcgccgaccactaccagcagaacacccccatcggcgacggccccgtgctgctgcccgacaaccactacctgagcacccagtccgccctgagcaaagaccccaacgagaagcgcgatcacatggtcctgctggagttcgtgaccgccgccgggatcactctcggcatggacgagctgtacaaggaattctaactagagctcgctgatcagcctcgactgtgccttctagttgccagccatctgttgtttgcccctcccccgtgccttccttgaccctggaaggtgccactcccactgtcctttcctaataaaatgaggaaattgcatcgcattgtctgagtaggtgtcattctattctggggggtggggtggggcaggacagcaagggggaggattgggaagagaatagcaggcatgctggggatcgaagacacagtcggctggtttttttgtttttagcgttataacttttatttcactatgtcactgtatggttgcattttatgtcagtgaatggttgcaggttttttgtaagttattgatatgcctatccagtgtatgtcacgctttgcttgcagcgacaggtaccgagctcgaattcactggccgtcgttttacaacgtcgtgactgggaaaaccctggcgttacccaacttaatcgccttgcagcacatccccctttcgccagctggcgtaatagcgaagaggcccgcaccgatcgcccttcccaac

SEQ ID NO: 49 - DNA, 4831 bp, synthetic construct
  source 1..4831: mol_type = other DNA
actcatatatactttagattgatttaaaacttcatttttaatttaaaaggatctaggtgaagatcctttttgataatctcatgaccaaaatcccttaacgtgagttttcgttccactgagcgtcagaccccgtagaaaagatcaaaggatcttcttgagatcctttttttctgcgcgtaatctgctgcttgcaaacaaaaaaaccaccgctaccagcggtggtttgtttgccggatcaagagctaccaactctttttccgaaggtaactggcttcagcagagcgcagataccaaatactgttcttctagtgtagccgtagttaggccaccacttcaagaactctgtagcaccgcctacatacctcgctctgctaatcctgttaccagtggctgctgccagtggcgataagtcgtgtcttaccgggttggactcaagacgatagttaccggataaggcgcagcggtcgggctgaacggggggttcgtgcacacagcccagcttggagcgaacgacctacaccgaactgagatacctacagcgtgagctatgagaaagcgccacgcttcccgaagggagaaaggcggacaggtatccggtaagcggcagggtcggaacaggagagcgcacgagggagcttccagggggaaacgcctggtatctttatagtcctgtcgggtttcgccacctctgacttgagcgtcgatttttgtgatgctcgtcaggggggcggagcctatggaaaaacgccagcaacgcggcctttttacggttcctggccttttgctggccttttgctcacatgttctttcctgcgttatcccctgattctgtggataaccgtattaccgcctttgagtgagctgataccgctcgccgcagccgaacgaccgagcgcagcgagtcagtgagcgaggaagcggaagagcgcccaatacgcaaaccgcctctccccgcgcgttggccgattcattaatgcagctggcacgacaggtttcccgactggaaagcgggcagtgagcgcaacgcaattaatgtgagttagctcactcattaggcaccccaggctttacactttatgcttccggctcgtatgttgtgtggaattgtgagcggataacaatttcacacaggaaacagctatgaccatgattacgccaacgtttaataaataataaataataaaataaaaaataaaaaataaataagatacattgatgagtttggacaaaccacaactagaatgcagtgaaaaaaatgctttatttgtgaaatttgtgatgctattgctttatttgtaaccattataagctgcaataaacaagttaagctttgtcgctgcaaccatagtttgacataatgcaaccataccttgacataattaaagtcatactctgacataaagcccccactggattgtacaattacgatcagaaagtagagaccatgtttcccccctgacctcttctcttcctcccacagggcctcgagagatctggcagcggagagggcagaggaagtctgctaacatgcggtgacgtcgaggagaatcctggccctaggctcgagatgaccgagtacaagcccacggtgcgcctcgccacccgcgacgacgtccccagggccgtacgcaccctcgccgccgcgttcgccgactaccccgccacgcgccacaccgtcgatccggaccgccacatcgagcgggtcaccgagctgcaagaactcttcctcacgcgcgtcgggctcgacatcggcaaggtgtgggtcgcggacgacggcgccgcggtggcggtctggaccacgccggagagcgtcgaagcgggggcggtgttcgccgagatcggcccgcgcatggccgagttgagcggttcccggctggccgcgcagcaacagatggaaggcctcctggcgccgcaccggcccaaggagcccgcgtggttcctggccaccgtcggagtctcgcccgaccaccagggcaagggtctgggcagcgccgtcgtgctccccggagtggaggcggccgagcgcgccggggtgcccgccttcctggagacctccgcgccccgcaacctccccttctacgagcggctcggcttcaccgtcaccgccgacgtcgaggtgcccgaaggaccgcgcacctggtgcatgacccgcaagcccggtgccggcagtggagagggcagaggaagtctgctaacatgcggtgacgtcgaggagaatcctggcccagtgagcaagggcgaggagctgttcaccggggtggtgcccatcctggtcgagctggacggcgacgtaaacggccacaagttcagcgtgtccggcgagggcgagggcgatgccacctacggcaagctgaccctgaagttcatctgcaccaccggcaagctgcccgtgccctggcccaccctcgtgaccaccctgacctacggcgtgcagtgcttcagccgctaccccgaccacatgaagcagcacgacttcttcaagtccgccatgcccgaaggctacgtccaggagcgcaccatcttcttcaaggacgacggcaactacaagacccgcgccgaggtgaagttcgagggcgacaccctggtgaaccgcatcgagctgaagggcatcgacttcaaggaggacggcaacatcctggggcacaagctggagtacaactacaacagccacaacgtctatatcatggccgacaagcagaagaacggcatcaaggtgaacttcaagatccgccacaacatcgaggacggcagcgtgcagctcgccgaccactaccagcagaacacccccatcggcgacggccccgtgctgctgcccgacaaccactacctgagcacccagtgcgccctgagcaaagaccccaacgagaagcgcgatcacatggtcctgctggagttcgtgaccgccgccgggatcactctcggcatggacgagctgtacaaggaattctaactagagctcgctgatcagcctcgactgtgccttctagttgccagccatctgttgtttgcccctcccccgtgccttccttgaccctggaaggtgccactcccactgtcctttcctaataaaatgaggaaattgcatcgcattgtctgagtaggtgtcattctattctggggggtggggtggggcaggacagcaagggggaggattgggaagagaatagcaggcatgctggggatcgaagacacagtcggctggtttttttgtttttagcgttataacttttatttcactatgtcactgtatggttgcattttatgtcagtgaatggttgcaggttttttgtaagttattgatatgcctatccagtgtatgtcacgctttgcttgcagcgacaggtaccgagctcgaattcactggccgtcgttttacaacgtcgtgactgggaaaaccctggcgttacccaacttaatcgccttgcagcacatccccctttcgccagctggcgtaatagcgaagaggcccgcaccgatcgcccttcccaacagttgcgcagcctgaatggcgaatggcgcctgatgcggtattttctccttacgcatctgtgcggtatttcacaccgcatatggtgcactctcagtacaatctgctctgatgccgcatagttaagccagccccgacacccgccaacacccgctgacgcgccctgacgggcttgtctgctcccggcatccgcttacagacaagctgtgaccgtctccgggagctgcatgtgtcagaggttttcaccgtcatcaccgaaacgcgcgagacgaaagggcctcgtgatacgcctatttttataggttaatgtcatgataataatggtttcttagacgtcaggtggcacttttcggggaaatgtgcgcggaacccctatttgtttatttttctaaatacattcaaatatgtatccgctcatgagacaataaccctgataaatgcttcaataatattgaaaaaggaagagtatgagtattcaacatttccgtgtcgcccttattcccttttttgcggcattttgccttcctgtttttgctcacccagaaacgctggtgaaagtaaaagatgctgaagatcagttgggtgcacgagtgggttacatcgaactggatctcaacagcggtaagatccttgagagttttcgccccgaagaacgttttccaatgatgagcacttttaaagttctgctatgtggcgcggtattatcccgtattgacgccgggcaagagcaactcggtcgccgcatacactattctcagaatgacttggttgagtactcaccagtcacagaaaagcatcttacggatggcatgacagtaagagaattatgcagtgctgccataaccatgagtgataacactgcggccaacttacttctgacaacgatcggaggaccgaaggagctaaccgcttttttgcacaacatgggggatcatgtaactcgccttgatcgttgggaaccggagctgaatgaagccataccaaacgacgagcgtgacaccacgatgcctgtagcaatggcaacaacgttgcgcaaactattaactggcgaactacttactctagcttcccggcaacaattaatagactggatggaggcggataaagttgcaggaccacttctgcgctcggcccttccggctggctggtttattgctgataaatctggagccggtgagcgtgggtctcgcggtatcattgcagcactggggccagatggtaagccctcccgtatcgtagttatctacacgacggggagtcaggcaactatggatgaacgaaatagacagatcgctgagataggtgcctcactgattaagcattggtaactgtcagaccaagttt

SEQ ID NO: 50 - DNA, 4817 bp, synthetic construct
  source 1..4817: mol_type = other DNA
agttgcgcagcctgaatggcgaatggcgcctgatgcggtattttctccttacgcatctgtgcggtatttcacaccgcatatggtgcactctcagtacaatctgctctgatgccgcatagttaagccagccccgacacccgccaacacccgctgacgcgccctgacgggcttgtctgctcccggcatccgcttacagacaagctgtgaccgtctccgggagctgcatgtgtcagaggttttcaccgtcatcaccgaaacgcgcgagacgaaagggcctcgtgatacgcctatttttataggttaatgtcatgataataatggtttcttagacgtcaggtggcacttttcggggaaatgtgcgcggaacccctatttgtttatttttctaaatacattcaaatatgtatccgctcatgagacaataaccctgataaatgcttcaataatattgaaaaaggaagagtatgagtattcaacatttccgtgtcgcccttattcccttttttgcggcattttgccttcctgtttttgctcacccagaaacgctggtgaaagtaaaagatgctgaagatcagttgggtgcacgagtgggttacatcgaactggatctcaacagcggtaagatccttgagagttttcgccccgaagaacgttttccaatgatgagcacttttaaagttctgctatgtggcgcggtattatcccgtattgacgccgggcaagagcaactcggtcgccgcatacactattctcagaatgacttggttgagtactcaccagtcacagaaaagcatcttacggatggcatgacagtaagagaattatgcagtgctgccataaccatgagtgataacactgcggccaacttacttctgacaacgatcggaggaccgaaggagctaaccgcttttttgcacaacatgggggatcatgtaactcgccttgatcgttgggaaccggagctgaatgaagccataccaaacgacgagcgtgacaccacgatgcctgtagcaatggcaacaacgttgcgcaaactattaactggcgaactacttactctagcttcccggcaacaattaatagactggatggaggcggataaagttgcaggaccacttctgcgctcggcccttccggctggctggtttattgctgataaatctggagccggtgagcgtgggtctcgcggtatcattgcagcactggggccagatggtaagccctcccgtatcgtagttatctacacgacggggagtcaggcaactatggatgaacgaaatagacagatcgctgagataggtgcctcactgattaagcattggtaactgtcagaccaagtttactcatatatactttagattgatttaaaacttcatttttaatttaaaaggatctaggtgaagatcctttttgataatctcatgaccaaaatcccttaacgtgagttttcgttccactgagcgtcagaccccgtagaaaagatcaaaggatcttcttgagatcctttttttctgcgcgtaatctgctgcttgcaaacaaaaaaaccaccgctaccagcggtggtttgtttgccggatcaagagctaccaactctttttccgaaggtaactggcttcagcagagcgcagataccaaatactgttcttctagtgtagccgtagttaggccaccacttcaagaactctgtagcaccgcctacatacctcgctctgctaatcctgttaccagtggctgctgccagtggcgataagtcgtgtcttaccgggttggactcaagacgatagttaccggataaggcgcagcggtcgggctgaacggggggttcgtgcacacagcccagcttggagcgaacgacctacaccgaactgagatacctacagcgtgagctatgagaaagcgccacgcttcccgaagggagaaaggcggacaggtatccggtaagcggcagggtcggaacaggagagcgcacgagggagcttccagggggaaacgcctggtatctttatagtcctgtcgggtttcgccacctctgacttgagcgtcgatttttgtgatgctcgtcaggggggcggagcctatggaaaaacgccagcaacgcggcctttttacggttcctggccttttgctggccttttgctcacatgttctttcctgcgttatcccctgattctgtggataaccgtattaccgcctttgagtgagctgataccgctcgccgcagccgaacgaccgagcgcagcgagtcagtgagcgaggaagcggaagagcgcccaatacgcaaaccgcctctccccgcgcgttggccgattcattaatgcagctggcacgacaggtttcccgactggaaagcgggcagtgagcgcaacgcaattaatgtgagttagctcactcattaggcaccccaggctttacactttatgcttccggctcgtatgttgtgtggaattgtgagcggataacaatttcacacaggaaacagctatgaccatgattacgccaacgtttaataaataataaataataaaataaaaaataaaaaataaataagatacattgatgagtttggacaaaccacaactagaatgcagtgaaaaaaatgctttatttgtgaaatttgtgatgctattgctttatttgtaaccattataagctgcaataaacaagttaagctttgtcgctgcaaccatagtttgacataatgcaaccataccttgacataattaaagtcatactctgacataaagcccgatcgtgtcttccatggaaaacttgctggggacagctgacctcttctcttcctcccacagggcctcgagagatctggcagcggagagggcagaggaagtctgctaacatgcggtgacgtcgaggagaatcctggccctaggctcgagatgaccgagtacaagcccacggtgcgcctcgccacccgcgacgacgtccccagggccgtacgcaccctcgccgccgcgttcgccgactaccccgccacgcgccacaccgtcgatccggaccgccacatcgagcgggtcaccgagctgcaagaactcttcctcacgcgcgtcgggctcgacatcggcaaggtgtgggtcgcggacgacggcgccgcggtggcggtctggaccacgccggagagcgtcgaagcgggggcggtgttcgccgagatcggcccgcgcatggccgagttgagcggttcccggctggccgcgcagcaacagatggaaggcctcctggcgccgcaccggcccaaggagcccgcgtggttcctggccaccgtcggagtctcgcccgaccaccagggcaagggtctgggcagcgccgtcgtgctccccggagtggaggcggccgagcgcgccggggtgcccgccttcctggagacctccgcgccccgcaacctccccttctacgagcggctcggcttcaccgtcaccgccgacgtcgaggtgcccgaaggaccgcgcacctggtgcatgacccgcaagcccggtgccggcagtggagagggcagaggaagtctgctaacatgcggtgacgtcgaggagaatcctggcccagtgagcaagggcgaggagctgttcaccggggtggtgcccatcctggtcgagctggacggcgacgtaaacggccacaagttcagcgtgtccggcgagggcgagggcgatgccacctacggcaagctgaccctgaagttcatctgcaccaccggcaagctgcccgtgccctggcccaccctcgtgaccaccctgacctacggcgtgcagtgcttcagccgctaccccgaccacatgaagcagcacgacttcttcaagtccgccatgcccgaaggctacgtccaggagcgcaccatcttcttcaaggacgacggcaactacaagacccgcgccgaggtgaagttcgagggcgacaccctggtgaaccgcatcgagctgaagggcatcgacttcaaggaggacggcaacatcctggggcacaagctggagtacaactacaacagccacaacgtctatatcatggccgacaagcagaagaacggcatcaaggtgaacttcaagatccgccacaacatcgaggacggcagcgtgcagctcgccgaccactaccagcagaacacccccatcggcgacggccccgtgctgctgcccgacaaccactacctgagcacccagtccgccctgagcaaagaccccaacgagaagcgcgatcacatggtcctgctggagttcgtgaccgccgccgggatcactctcggcatggacgagctgtacaaggaattctaactagagctcgctgatcagcctcgactgtgccttctagttgccagccatctgttgtttgcccctcccccgtgccttccttgaccctggaaggtgccactcccactgtcctttcctaataaaatgaggaaattgcatcgcattgtctgagtaggtgtcattctattctggggggtggggtggggcaggacagcaagggggaggattgggaagagaatagcaggcatgctggggatcgaagacacagtcggctggtttttttgtttttagcgttataacttttatttcactatgtcactgtatggttgcattttatgtcagtgaatggttgcaggttttttgtaagttattgatatgcctatccagtgtatgtcacgctttgcttgcagcgacaggtaccgagctcgaattcactggccgtcgttttacaacgtcgtgactgggaaaaccctggcgttacccaacttaatcgccttgcagcacatccccctttcgccagctggcgtaatagcgaagaggcccgcaccgatcgcccttcccaac

SEQ ID NO: 51 - DNA, 4813 bp, synthetic construct
  source 1..4813: mol_type = other DNA
agttgcgcagcctgaatggcgaatggcgcctgatgcggtattttctccttacgcatctgtgcggtatttcacaccgcatatggtgcactctcagtacaatctgctctgatgccgcatagttaagccagccccgacacccgccaacacccgctgacgcgccctgacgggcttgtctgctcccggcatccgcttacagacaagctgtgaccgtctccgggagctgcatgtgtcagaggttttcaccgtcatcaccgaaacgcgcgagacgaaagggcctcgtgatacgcctatttttataggttaatgtcatgataataatggtttcttagacgtcaggtggcacttttcggggaaatgtgcgcggaacccctatttgtttatttttctaaatacattcaaatatgtatccgctcatgagacaataaccctgataaatgcttcaataatattgaaaaaggaagagtatgagtattcaacatttccgtgtcgcccttattcccttttttgcggcattttgccttcctgtttttgctcacccagaaacgctggtgaaagtaaaagatgctgaagatcagttgggtgcacgagtgggttacatcgaactggatctcaacagcggtaagatccttgagagttttcgccccgaagaacgttttccaatgatgagcacttttaaagttctgctatgtggcgcggtattatcccgtattgacgccgggcaagagcaactcggtcgccgcatacactattctcagaatgacttggttgagtactcaccagtcacagaaaagcatcttacggatggcatgacagtaagagaattatgcagtgctgccataaccatgagtgataacactgcggccaacttacttctgacaacgatcggaggaccgaaggagctaaccgcttttttgcacaacatgggggatcatgtaactcgccttgatcgttgggaaccggagctgaatgaagccataccaaacgacgagcgtgacaccacgatgcctgtagcaatggcaacaacgttgcgcaaactattaactggcgaactacttactctagcttcccggcaacaattaatagactggatggaggcggataaagttgcaggaccacttctgcgctcggcccttccggctggctggtttattgctgataaatctggagccggtgagcgtgggtctcgcggtatcattgcagcactggggccagatggtaagccctcccgtatcgtagttatctacacgacggggagtcaggcaactatggatgaacgaaatagacagatcgctgagataggtgcctcactgattaagcattggtaactgtcagaccaagtttactcatatatactttagattgatttaaaacttcatttttaatttaaaaggatctaggtgaagatcctttttgataatctcatgaccaaaatcccttaacgtgagttttcgttccactgagcgtcagaccccgtagaaaagatcaaaggatcttcttgagatcctttttttctgcgcgtaatctgctgcttgcaaacaaaaaaaccaccgctaccagcggtggtttgtttgccggatcaagagctaccaactctttttccgaaggtaactggcttcagcagagcgcagataccaaatactgttcttctagtgtagccgtagttaggccaccacttcaagaactctgtagcaccgcctacatacctcgctctgctaatcctgttaccagtggctgctgccagtggcgataagtcgtgtcttaccgggttggactcaagacgatagttaccggataaggcgcagcggtcgggctgaacggggggttcgtgcacacagcccagcttggagcgaacgacctacaccgaactgagatacctacagcgtgagctatgagaaagcgccacgcttcccgaagggagaaaggcggacaggtatccggtaagcggcagggtcggaacaggagagcgcacgagggagcttccagggggaaacgcctggtatctttatagtcctgtcgggtttcgccacctctgacttgagcgtcgatttttgtgatgctcgtcaggggggcggagcctatggaaaaacgccagcaacgcggcctttttacggttcctggccttttgctggccttttgctcacatgttctttcctgcgttatcccctgattctgtggataaccgtattaccgcctttgagtgagctgataccgctcgccgcagccgaacgaccgagcgcagcgagtcagtgagcgaggaagcggaagagcgcccaatacgcaaaccgcctctccccgcgcgttggccgattcattaatgcagctggcacgacaggtttcccgactggaaagcgggcagtgagcgcaacgcaattaatgtgagttagctcactcattaggcaccccaggctttacactttatgcttccggctcgtatgttgtgtggaattgtgagcggataacaatttcacacaggaaacagctatgaccatgattacgccaacgtttaataaataataaataataaaataaaaaataaaaaataaataagatacattgatgagtttggacaaaccacaactagaatgcagtgaaaaaaatgctttatttgtgaaatttgtgatgctattgctttatttgtaaccattataagctgcaataaacaagttaagctttgtcgctgcaaccatagtttgacataatgcaaccataccttgacataattaaagtcatactctgacataaagcccgatcgtgtcttccattaaaggtgtgaggtggctgacctcttctcttcctcccacagggcctcgagagatctggcagcggagagggcagaggaagtctgctaacatgcggtgacgtcgaggagaatcctggccctaggctcgagatgaccgagtacaagcccacggtgcgcctcgccacccgcgacgacgtccccagggccgtacgcaccctcgccgccgcgttcgccgactaccccgccacgcgccacaccgtcgatccggaccgccacatcgagcgggtcaccgagctgcaagaactcttcctcacgcgcgtcgggctcgacatcggcaaggtgtgggtcgcggacgacggcgccgcggtggcggtctggaccacgccggagagcgtcgaagcgggggcggtgttcgccgagatcggcccgcgcatggccgagttgagcggttcccggctggccgcgcagcaacagatggaaggcctcctggcgccgcaccggcccaaggagcccgcgtggttcctggccaccgtcggagtctcgcccgaccaccagggcaagggtctgggcagcgccgtcgtgctccccggagtggaggcggccgagcgcgccggggtgcccgccttcctggagacctccgcgccccgcaacctccccttctacgagcggctcggcttcaccgtcaccgccgacgtcgaggtgcccgaaggaccgcgcacctggtgcatgacccgcaagcccggtgccggcagtggagagggcagaggaagtctgctaacatgcggtgacgtcgaggagaatcctggcccagtgagcaagggcgaggagctgttcaccggggtggtgcccatcctggtcgagctggacggcgacgtaaacggccacaagttcagcgtgtccggcgagggcgagggcgatgccacctacggcaagctgaccctgaagttcatctgcaccaccggcaagctgcccgtgccctggcccaccctcgtgaccaccctgacctacggcgtgcagtgcttcagccgctaccccgaccacatgaagcagcacgacttcttcaagtccgccatgcccgaaggctacgtccaggagcgcaccatcttcttcaaggacgacggcaactacaagacccgcgccgaggtgaagttcgagggcgacaccctggtgaaccgcatcgagctgaagggcatcgacttcaaggaggacggcaacatcctggggcacaagctggagtacaactacaacagccacaacgtctatatcatggccgacaagcagaagaacggcatcaaggtgaacttcaagatccgccacaacatcgaggacggcagcgtgcagctcgccgaccactaccagcagaacacccccatcggcgacggccccgtgctgctgcccgacaaccactacctgagcacccagtccgccctgagcaaagaccccaacgagaagcgcgatcacatggtcctgctggagttcgtgaccgccgccgggatcactctcggcatggacgagctgtacaaggaattctaactagagctcgctgatcagcctcgactgtgccttctagttgccagccatctgttgtttgcccctcccccgtgccttccttgaccctggaaggtgccactcccactgtcctttcctaataaaatgaggaaattgcatcgcattgtctgagtaggtgtcattctattctggggggtggggtggggcaggacagcaagggggaggattgggaagagaatagcaggcatgctggggatcgaagacacagtcggctggtttttttgtttttagcgttataacttttatttcactatgtcactgtatggttgcattttatgtcagtgaatggttgcaggttttttgtaagttattgatatgcctatccagtgtatgtcacgctttgcttgcagcgacaggtaccgagctcgaattcactggccgtcgttttacaacgtcgtgactgggaaaaccctggcgttacccaacttaatcgccttgcagcacatccccctttcgccagctggcgtaatagcgaagaggcccgcaccgatcgcccttcccaac

SEQ ID NO: 52 - DNA, 4813 bp, synthetic construct
  source 1..4813: mol_type = other DNA
agttgcgcagcctgaatggcgaatggcgcctgatgcggtattttctccttacgcatctgtgcggtatttcacaccgcatatggtgcactctcagtacaatctgctctgatgccgcatagttaagccagccccgacacccgccaacacccgctgacgcgccctgacgggcttgtctgctcccggcatccgcttacagacaagctgtgaccgtctccgggagctgcatgtgtcagaggttttcaccgtcatcaccgaaacgcgcgagacgaaagggcctcgtgatacgcctatttttataggttaatgtcatgataataatggtttcttagacgtcaggtggcacttttcggggaaatgtgcgcggaacccctatttgtttatttttctaaatacattcaaatatgtatccgctcatgagacaataaccctgataaatgcttcaataatattgaaaaaggaagagtatgagtattcaacatttccgtgtcgcccttattcccttttttgcggcattttgccttcctgtttttgctcacccagaaacgctggtgaaagtaaaagatgctgaagatcagttgggtgcacgagtgggttacatcgaactggatctcaacagcggtaagatccttgagagttttcgccccgaagaacgttttccaatgatgagcacttttaaagttctgctatgtggcgcggtattatcccgtattgacgccgggcaagagcaactcggtcgccgcatacactattctcagaatgacttggttgagtactcaccagtcacagaaaagcatcttacggatggcatgacagtaagagaattatgcagtgctgccataaccatgagtgataacactgcggccaacttacttctgacaacgatcggaggaccgaaggagctaaccgcttttttgcacaacatgggggatcatgtaactcgccttgatcgttgggaaccggagctgaatgaagccataccaaacgacgagcgtgacaccacgatgcctgtagcaatggcaacaacgttgcgcaaactattaactggcgaactacttactctagcttcccggcaacaattaatagactggatggaggcggataaagttgcaggaccacttctgcgctcggcccttccggctggctggtttattgctgataaatctggagccggtgagcgtgggtctcgcggtatcattgcagcactggggccagatggtaagccctcccgtatcgtagttatctacacgacggggagtcaggcaactatggatgaacgaaatagacagatcgctgagataggtgcctcactgattaagcattggtaactgtcagaccaagtttactcatatatactttagattgatttaaaacttcatttttaatttaaaaggatctaggtgaagatcctttttgataatctcatgaccaaaatcccttaacgtgagttttcgttccactgagcgtcagaccccgtagaaaagatcaaaggatcttcttgagatcctttttttctgcgcgtaatctgctgcttgcaaacaaaaaaaccaccgctaccagcggtggtttgtttgccggatcaagagctaccaactctttttccgaaggtaactggcttcagcagagcgcagataccaaatactgttcttctagtgtagccgtagttaggccaccacttcaagaactctgtagcaccgcctacatacctcgctctgctaatcctgttaccagtggctgctgccagtggcgataagtcgtgtcttaccgggttggactcaagacgatagttaccggataaggcgcagcggtcgggctgaacggggggttcgtgcacacagcccagcttggagcgaacgacctacaccgaactgagatacctacagcgtgagctatgagaaagcgccacgcttcccgaagggagaaaggcggacaggtatccggtaagcggcagggtcggaacaggagagcgcacgagggagcttccagggggaaacgcctggtatctttatagtcctgtcgggtttcgccacctctgacttgagcgtcgatttttgtgatgctcgtcaggggggcggagcctatggaaaaacgccagcaacgcggcctttttacggttcctggccttttgctggccttttgctcacatgttctttcctgcgttatcccctgattctgtggataaccgtattaccgcctttgagtgagctgataccgctcgccgcagccgaacgaccgagcgcagcgagtcagtgagcgaggaagcggaagagcgcccaatacgcaaaccgcctctccccgcgcgttggccgattcattaatgcagctggcacgacaggtttcccgactggaaagcgggcagtgagcgcaacgcaattaatgtgagttagctcactcattaggcaccccaggctttacactttatgcttccggctcgtatgttgtgtggaattgtgagcggataacaatttcacacaggaaacagctatgaccatgattacgccaacgtttaataaataataaataataaaataaaaaataaaaaataaataagatacattgatgagtttggacaaaccacaactagaatgcagtgaaaaaaatgctttatttgtgaaatttgtgatgctattgctttatttgtaaccattataagctgcaataaacaagttaagctttgtcgctgcaaccatagtttgacataatgcaaccataccttgacataattaaagtcatactctgacataaagcccgatcgtgtcttcggagaaactgggtctctacctgacctcttctcttcctcccacagggcctcgagagatctggcagcggagagggcagaggaagtctgctaacatgcggtgacgtcgaggagaatcctggccctaggctcgagatgaccgagtacaagcccacggtgcgcctcgccacccgcgacgacgtccccagggccgtacgcaccctcgccgccgcgttcgccgactaccccgccacgcgccacaccgtcgatccggaccgccacatcgagcgggtcaccgagctgcaagaactcttcctcacgcgcgtcgggctcgacatcggcaaggtgtgggtcgcggacgacggcgccgcggtggcggtctggaccacgccggagagcgtcgaagcgggggcggtgttcgccgagatcggcccgcgcatggccgagttgagcggttcccggctggccgcgcagcaacagatggaaggcctcctggcgccgcaccggcccaaggagcccgcgtggttcctggccaccgtcggagtctcgcccgaccaccagggcaagggtctgggcagcgccgtcgtgctccccggagtggaggcggccgagcgcgccggggtgcccgccttcctggagacctccgcgccccgcaacctccccttctacgagcggctcggcttcaccgtcaccgccgacgtcgaggtgcccgaaggaccgcgcacctggtgcatgacccgcaagcccggtgccggcagtggagagggcagaggaagtctgctaacatgcggtgacgtcgaggagaatcctggcccagtgagcaagggcgaggagctgttcaccggggtggtgcccatcctggtcgagctggacggcgacgtaaacggccacaagttcagcgtgtccggcgagggcgagggcgatgccacctacggcaagctgaccctgaagttcatctgcaccaccggcaagctgcccgtgccctggcccaccctcgtgaccaccctgacctacggcgtgcagtgcttcagccgctaccccgaccacatgaagcagcacgacttcttcaagtccgccatgcccgaaggctacgtccaggagcgcaccatcttcttcaaggacgacggcaactacaagacccgcgccgaggtgaagttcgagggcgacaccctggtgaaccgcatcgagctgaagggcatcgacttcaaggaggacggcaacatcctggggcacaagctggagtacaactacaacagccacaacgtctatatcatggccgacaagcagaagaacggcatcaaggtgaacttcaagatccgccacaacatcgaggacggcagcgtgcagctcgccgaccactaccagcagaacacccccatcggcgacggccccgtgctgctgcccgacaaccactacctgagcacccagtccgccctgagcaaagaccccaacgagaagcgcgatcacatggtcctgctggagttcgtgaccgccgccgggatcactctcggcatggacgagctgtacaaggaattctaactagagctcgctgatcagcctcgactgtgccttctagttgccagccatctgttgtttgcccctcccccgtgccttccttgaccctggaaggtgccactcccactgtcctttcctaataaaatgaggaaattgcatcgcattgtctgagtaggtgtcattctattctggggggtggggtggggcaggacagcaagggggaggattgggaagagaatagcaggcatgctggggatcgaagacacagtcggctggtttttttgtttttagcgttataacttttatttcactatgtcactgtatggttgcattttatgtcagtgaatggttgcaggttttttgtaagttattgatatgcctatccagtgtatgtcacgctttgcttgcagcgacaggtaccgagctcgaattcactggccgtcgttttacaacgtcgtgactgggaaaaccctggcgttacccaacttaatcgccttgcagcacatccccctttcgccagctggcgtaatagcgaagaggcccgcaccgatcgcccttcccaac

SEQ ID NO: 53 - DNA, 4813 bp, synthetic construct
  source 1..4813: mol_type = other DNA
agttgcgcagcctgaatggcgaatggcgcctgatgcggtattttctccttacgcatctgtgcggtatttcacaccgcatatggtgcactctcagtacaatctgctctgatgccgcatagttaagccagccccgacacccgccaacacccgctgacgcgccctgacgggcttgtctgctcccggcatccgcttacagacaagctgtgaccgtctccgggagctgcatgtgtcagaggttttcaccgtcatcaccgaaacgcgcgagacgaaagggcctcgtgatacgcctatttttataggttaatgtcatgataataatggtttcttagacgtcaggtggcacttttcggggaaatgtgcgcggaacccctatttgtttatttttctaaatacattcaaatatgtatccgctcatgagacaataaccctgataaatgcttcaataatattgaaaaaggaagagtatgagtattcaacatttccgtgtcgcccttattcccttttttgcggcattttgccttcctgtttttgctcacccagaaacgctggtgaaagtaaaagatgctgaagatcagttgggtgcacgagtgggttacatcgaactggatctcaacagcggtaagatccttgagagttttcgccccgaagaacgttttccaatgatgagcacttttaaagttctgctatgtggcgcggtattatcccgtattgacgccgggcaagagcaactcggtcgccgcatacactattctcagaatgacttggttgagtactcaccagtcacagaaaagcatcttacggatggcatgacagtaagagaattatgcagtgctgccataaccatgagtgataacactgcggccaacttacttctgacaacgatcggaggaccgaaggagctaaccgcttttttgcacaacatgggggatcatgtaactcgccttgatcgttgggaaccggagctgaatgaagccataccaaacgacgagcgtgacaccacgatgcctgtagcaatggcaacaacgttgcgcaaactattaactggcgaactacttactctagcttcccggcaacaattaatagactggatggaggcggataaagttgcaggaccacttctgcgctcggcccttccggctggctggtttattgctgataaatctggagccggtgagcgtgggtctcgcggtatcattgcagcactggggccagatggtaagccctcccgtatcgtagttatctacacgacggggagtcaggcaactatggatgaacgaaatagacagatcgctgagataggtgcctcactgattaagcattggtaactgtcagaccaagtttactcatatatactttagattgatttaaaacttcatttttaatttaaaaggatctaggtgaagatcctttttgataatctcatgaccaaaatcccttaacgtgagttttcgttccactgagcgtcagaccccgtagaaaagatcaaaggatcttcttgagatcctttttttctgcgcgtaatctgctgcttgcaaacaaaaaaaccaccgctaccagcggtggtttgtttgccggatcaagagctaccaactctttttccgaaggtaactggcttcagcagagcgcagataccaaatactgttcttctagtgtagccgtagttaggccaccacttcaagaactctgtagcaccgcctacatacctcgctctgctaatcctgttaccagtggctgctgccagtggcgataagtcgtgtcttaccgggttggactcaagacgatagttaccggataaggcgcagcggtcgggctgaacggggggttcgtgcacacagcccagcttggagcgaacgacctacaccgaactgagatacctacagcgtgagctatgagaaagcgccacgcttcccgaagggagaaaggcggacaggtatccggtaagcggcagggtcggaacaggagagcgcacgagggagcttccagggggaaacgcctggtatctttatagtcctgtcgggtttcgccacctctgacttgagcgtcgatttttgtgatgctcgtcaggggggcggagcctatggaaaaacgccagcaacgcggcctttttacggttcctggccttttgctggccttttgctcacatgttctttcctgcgttatcccctgattctgtggataaccgtattaccgcctttgagtgagctgataccgctcgccgcagccgaacgaccgagcgcagcgagtcagtgagcgaggaagcggaagagcgcccaatacgcaaaccgcctctccccgcgcgttggccgattcattaatgcagctggcacgacaggtttcccgactggaaagcgggcagtgagcgcaacgcaattaatgtgagttagctcactcattaggcaccccaggctttacactttatgcttccggctcgtatgttgtgtggaattgtgagcggataacaatttcacacaggaaacagctatgaccatgattacgccaacgtttaataaataataaataataaaataaaaaataaaaaataaataagatacattgatgagtttggacaaaccacaactagaatgcagtgaaaaaaatgctttatttgtgaaatttgtgatgctattgctttatttgtaaccattataagctgcaataaacaagttaagctttgtcgctgcaaccatagtttgacataatgcaaccataccttgacataattaaagtcatactctgacataaagccccactctttatagattcctaaacccatctatactgacctcttctcttcctcccacagggcctcgagagatctggcagcggagagggcagaggaagtctgctaacatgcggtgacgtcgaggagaatcctggccctaggctcgagatgaccgagtacaagcccacggtgcgcctcgccacccgcgacgacgtccccagggccgtacgcaccctcgccgccgcgttcgccgactaccccgccacgcgccacaccgtcgatccggaccgccacatcgagcgggtcaccgagctgcaagaactcttcctcacgcgcgtcgggctcgacatcggcaaggtgtgggtcgcggacgacggcgccgcggtggcggtctggaccacgccggagagcgtcgaagcgggggcggtgttcgccgagatcggcccgcgcatggccgagttgagcggttcccggctggccgcgcagcaacagatggaaggcctcctggcgccgcaccggcccaaggagcccgcgtggttcctggccaccgtcggagtctcgcccgaccaccagggcaagggtctgggcagcgccgtcgtgctccccggagtggaggcggccgagcgcgccggggtgcccgccttcctggagacctccgcgccccgcaacctccccttctacgagcggctcggcttcaccgtcaccgccgacgtcgaggtgcccgaaggaccgcgcacctggtgcatgacccgcaagcccggtgccggcagtggagagggcagaggaagtctgctaacatgcggtgacgtcgaggagaatcctggcccagtgagcaagggcgaggagctgttcaccggggtggtgcccatcctggtcgagctggacggcgacgtaaacggccacaagttcagcgtgtccggcgagggcgagggcgatgccacctacggcaagctgaccctgaagttcatctgcaccaccggcaagctgcccgtgccctggcccaccctcgtgaccaccctgacctacggcgtgcagtgcttcagccgctaccccgaccacatgaagcagcacgacttcttcaagtccgccatgcccgaaggctacgtccaggagcgcaccatcttcttcaaggacgacggcaactacaagacccgcgccgaggtgaagttcgagggcgacaccctggtgaaccgcatcgagctgaagggcatcgacttcaaggaggacggcaacatcctggggcacaagctggagtacaactacaacagccacaacgtctatatcatggccgacaagcagaagaacggcatcaaggtgaacttcaagatccgccacaacatcgaggacggcagcgtgcagctcgccgaccactaccagcagaacacccccatcggcgacggccccgtgctgctgcccgacaaccactacctgagcacccagtccgccctgagcaaagaccccaacgagaagcgcgatcacatggtcctgctggagttcgtgaccgccgccgggatcactctcggcatggacgagctgtacaaggaattctaactagagctcgctgatcagcctcgactgtgccttctagttgccagccatctgttgtttgcccctcccccgtgccttccttgaccctggaaggtgccactcccactgtcctttcctaataaaatgaggaaattgcatcgcattgtctgagtaggtgtcattctattctggggggtggggtggggcaggacagcaagggggaggattgggaagagaatagcaggcatgctggggatcgaagacacagtcggctggtttttttgtttttagcgttataacttttatttcactatgtcactgtatggttgcattttatgtcagtgaatggttgcaggttttttgtaagttattgatatgcctatccagtgtatgtcacgctttgcttgcagcgacaggtaccgagctcgaattcactggccgtcgttttacaacgtcgtgactgggaaaaccctggcgttacccaacttaatcgccttgcagcacatccccctttcgccagctggcgtaatagcgaagaggcccgcaccgatcgcccttcccaac

SEQ ID NO: 54 - DNA, 4812 bp, synthetic construct
  source 1..4812: mol_type = other DNA
agttgcgcagcctgaatggcgaatggcgcctgatgcggtattttctccttacgcatctgtgcggtatttcacaccgcatatggtgcactctcagtacaatctgctctgatgccgcatagttaagccagccccgacacccgccaacacccgctgacgcgccctgacgggcttgtctgctcccggcatccgcttacagacaagctgtgaccgtctccgggagctgcatgtgtcagaggttttcaccgtcatcaccgaaacgcgcgagacgaaagggcctcgtgatacgcctatttttataggttaatgtcatgataataatggtttcttagacgtcaggtggcacttttcggggaaatgtgcgcggaacccctatttgtttatttttctaaatacattcaaatatgtatccgctcatgagacaataaccctgataaatgcttcaataatattgaaaaaggaagagtatgagtattcaacatttccgtgtcgcccttattcccttttttgcggcattttgccttcctgtttttgctcacccagaaacgctggtgaaagtaaaagatgctgaagatcagttgggtgcacgagtgggttacatcgaactggatctcaacagcggtaagatccttgagagttttcgccccgaagaacgttttccaatgatgagcacttttaaagttctgctatgtggcgcggtattatcccgtattgacgccgggcaagagcaactcggtcgccgcatacactattctcagaatgacttggttgagtactcaccagtcacagaaaagcatcttacggatggcatgacagtaagagaattatgcagtgctgccataaccatgagtgataacactgcggccaacttacttctgacaacgatcggaggaccgaaggagctaaccgcttttttgcacaacatgggggatcatgtaactcgccttgatcgttgggaaccggagctgaatgaagccataccaaacgacgagcgtgacaccacgatgcctgtagcaatggcaacaacgttgcgcaaactattaactggcgaactacttactctagcttcccggcaacaattaatagactggatggaggcggataaagttgcaggaccacttctgcgctcggcccttccggctggctggtttattgctgataaatctggagccggtgagcgtgggtctcgcggtatcattgcagcactggggccagatggtaagccctcccgtatcgtagttatctacacgacggggagtcaggcaactatggatgaacgaaatagacagatcgctgagataggtgcctcactgattaagcattggtaactgtcagaccaagtttactcatatatactttagattgatttaaaacttcatttttaatttaaaaggatctaggtgaagatcctttttgataatctcatgaccaaaatcccttaacgtgagttttcgttccactgagcgtcagaccccgtagaaaagatcaaaggatcttcttgagatcctttttttctgcgcgtaatctgctgcttgcaaacaaaaaaaccaccgctaccagcggtggtttgtttgccggatcaagagctaccaactctttttccgaaggtaactggcttcagcagagcgcagataccaaatactgttcttctagtgtagccgtagttaggccaccacttcaagaactctgtagcaccgcctacatacctcgctctgctaatcctgttaccagtggctgctgccagtggcgataagtcgtgtcttaccgggttggactcaagacgatagttaccggataaggcgcagcggtcgggctgaacggggggttcgtgcacacagcccagcttggagcgaacgacctacaccgaactgagatacctacagcgtgagctatgagaaagcgccacgcttcccgaagggagaaaggcggacaggtatccggtaagcggcagggtcggaacaggagagcgcacgagggagcttccagggggaaacgcctggtatctttatagtcctgtcgggtttcgccacctctgacttgagcgtcgatttttgtgatgctcgtcaggggggcggagcctatggaaaaacgccagcaacgcggcctttttacggttcctggccttttgctggccttttgctcacatgttctttcctgcgttatcccctgattctgtggataaccgtattaccgcctttgagtgagctgataccgctcgccgcagccgaacgaccgagcgcagcgagtcagtgagcgaggaagcggaagagcgcccaatacgcaaaccgcctctccccgcgcgttggccgattcattaatgcagctggcacgacaggtttcccgactggaaagcgggcagtgagcgcaacgcaattaatgtgagttagctcactcattaggcaccccaggctttacactttatgcttccggctcgtatgttgtgtggaattgtgagcggataacaatttcacacaggaaacagctatgaccatgattacgccaacgtttaataaataataaataataaaataaaaaataaaaaataaataagatacattgatgagtttggacaaaccacaactagaatgcagtgaaaaaaatgctttatttgtgaaatttgtgatgctattgctttatttgtaaccattataagctgcaataaacaagttaagctttgtcgctgcaaccatagtttgacataatgcaaccataccttgacataattaaagtcatactctgacataaagcccgatcgtgtcttcctgaggagtcagtgagttctgacctcttctcttcctcccacagggcctcgagagatctggcagcggagagggcagaggaagtctgctaacatgcggtgacgtcgaggagaatcctggccctaggctcgagatgaccgagtacaagcccacggtgcgcctcgccacccgcgacgacgtccccagggccgtacgcaccctcgccgccgcgttcgccgactaccccgccacgcgccacaccgtcgatccggaccgccacatcgagcgggtcaccgagctgcaagaactcttcctcacgcgcgtcgggctcgacatcggcaaggtgtgggtcgcggacgacggcgccgcggtggcggtctggaccacgccggagagcgtcgaagcgggggcggtgttcgccgagatcggcccgcgcatggccgagttgagcggttcccggctggccgcgcagcaacagatggaaggcctcctggcgccgcaccggcccaaggagcccgcgtggttcctggccaccgtcggagtctcgcccgaccaccagggcaagggtctgggcagcgccgtcgtgctccccggagtggaggcggccgagcgcgccggggtgcccgccttcctggagacctccgcgccccgcaacctccccttctacgagcggctcggcttcaccgtcaccgccgacgtcgaggtgcccgaaggaccgcgcacctggtgcatgacccgcaagcccggtgccggcagtggagagggcagaggaagtctgctaacatgcggtgacgtcgaggagaatcctggcccagtgagcaagggcgaggagctgttcaccggggtggtgcccatcctggtcgagctggacggcgacgtaaacggccacaagttcagcgtgtccggcgagggcgagggcgatgccacctacggcaagctgaccctgaagttcatctgcaccaccggcaagctgcccgtgccctggcccaccctcgtgaccaccctgacctacggcgtgcagtgcttcagccgctaccccgaccacatgaagcagcacgacttcttcaagtccgccatgcccgaaggctacgtccaggagcgcaccatcttcttcaaggacgacggcaactacaagacccgcgccgaggtgaagttcgagggcgacaccctggtgaaccgcatcgagctgaagggcatcgacttcaaggaggacggcaacatcctggggcacaagctggagtacaactacaacagccacaacgtctatatcatggccgacaagcagaagaacggcatcaaggtgaacttcaagatccgccacaacatcgaggacggcagcgtgcagctcgccgaccactaccagcagaacacccccatcggcgacggccccgtgctgctgcccgacaaccactacctgagcacccagtccgccctgagcaaagaccccaacgagaagcgcgatcacatggtcctgctggagttcgtgaccgccgccgggatcactctcggcatggacgagctgtacaaggaattctaactagagctcgctgatcagcctcgactgtgccttctagttgccagccatctgttgtttgcccctcccccgtgccttccttgaccctggaaggtgccactcccactgtcctttcctaataaaatgaggaaattgcatcgcattgtctgagtaggtgtcattctattctggggggtggggtggggcaggacagcaagggggaggattgggaagagaatagcaggcatgctggggatcgaagacacagtcggctggtttttttgtttttagcgttataacttttatttcactatgtcactgtatggttgcattttatgtcagtgaatggttgcaggttttttgtaagttattgatatgcctatccagtgtatgtcacgctttgcttgcagcgacaggtaccgagctcgaattcactggccgtcgttttacaacgtcgtgactgggaaaaccctggcgttacccaacttaatcgccttgcagcacatccccctttcgccagctggcgtaatagcgaagaggcccgcaccgatcgcccttcccaac

SEQ ID NO: 55 - DNA, 4824 bp, synthetic construct
  source 1..4824: mol_type = other DNA
actcatatatactttagattgatttaaaacttcatttttaatttaaaaggatctaggtgaagatcctttttgataatctcatgaccaaaatcccttaacgtgagttttcgttccactgagcgtcagaccccgtagaaaagatcaaaggatcttcttgagatcctttttttctgcgcgtaatctgctgcttgcaaacaaaaaaaccaccgctaccagcggtggtttgtttgccggatcaagagctaccaactctttttccgaaggtaactggcttcagcagagcgcagataccaaatactgttcttctagtgtagccgtagttaggccaccacttcaagaactctgtagcaccgcctacatacctcgctctgctaatcctgttaccagtggctgctgccagtggcgataagtcgtgtcttaccgggttggactcaagacgatagttaccggataaggcgcagcggtcgggctgaacggggggttcgtgcacacagcccagcttggagcgaacgacctacaccgaactgagatacctacagcgtgagctatgagaaagcgccacgcttcccgaagggagaaaggcggacaggtatccggtaagcggcagggtcggaacaggagagcgcacgagggagcttccagggggaaacgcctggtatctttatagtcctgtcgggtttcgccacctctgacttgagcgtcgatttttgtgatgctcgtcaggggggcggagcctatggaaaaacgccagcaacgcggcctttttacggttcctggccttttgctggccttttgctcacatgttctttcctgcgttatcccctgattctgtggataaccgtattaccgcctttgagtgagctgataccgctcgccgcagccgaacgaccgagcgcagcgagtcagtgagcgaggaagcggaagagcgcccaatacgcaaaccgcctctccccgcgcgttggccgattcattaatgcagctggcacgacaggtttcccgactggaaagcgggcagtgagcgcaacgcaattaatgtgagttagctcactcattaggcaccccaggctttacactttatgcttccggctcgtatgttgtgtggaattgtgagcggataacaatttcacacaggaaacagctatgaccatgattacgccaacgtttaataaataataaataataaaataaaaaataaaaaataaataagatacattgatgagtttggacaaaccacaactagaatgcagtgaaaaaaatgctttatttgtgaaatttgtgatgctattgctttatttgtaaccattataagctgcaataaacaagttaagctttgtcgctgcaaccatagtttgacataatgcaaccataccttgacataattaaagtcatactctgacataaagcccccactggattgtacaattacgatcaggcacctcggcctcgttctgacctcttctcttcctcccacagggcctcgagagatctggcagcggagagggcagaggaagtctgctaacatgcggtgacgtcgaggagaatcctggccctaggctcgagatgaccgagtacaagcccacggtgcgcctcgccacccgcgacgacgtccccagggccgtacgcaccctcgccgccgcgttcgccgactaccccgccacgcgccacaccgtcgatccggaccgccacatcgagcgggtcaccgagctgcaagaactcttcctcacgcgcgtcgggctcgacatcggcaaggtgtgggtcgcggacgacggcgccgcggtggcggtctggaccacgccggagagcgtcgaagcgggggcggtgttcgccgagatcggcccgcgcatggccgagttgagcggttcccggctggccgcgcagcaacagatggaaggcctcctggcgccgcaccggcccaaggagcccgcgtggttcctggccaccgtcggagtctcgcccgaccaccagggcaagggtctgggcagcgccgtcgtgctccccggagtggaggcggccgagcgcgccggggtgcccgccttcctggagacctccgcgccccgcaacctccccttctacgagcggctcggcttcaccgtcaccgccgacgtcgaggtgcccgaaggaccgcgcacctggtgcatgacccgcaagcccggtgccggcagtggagagggcagaggaagtctgctaacatgcggtgacgtcgaggagaatcctggcccagtgagcaagggcgaggagctgttcaccggggtggtgcccatcctggtcgagctggacggcgacgtaaacggccacaagttcagcgtgtccggcgagggcgagggcgatgccacctacggcaagctgaccctgaagttcatctgcaccaccggcaagctgcccgtgccctggcccaccctcgtgaccaccctgacctacggcgtgcagtgcttcagccgctaccccgaccacatgaagcagcacgacttcttcaagtccgccatgcccgaaggctacgtccaggagcgcaccatcttcttcaaggacgacggcaactacaagacccgcgccgaggtgaagttcgagggcgacaccctggtgaaccgcatcgagctgaagggcatcgacttcaaggaggacggcaacatcctggggcacaagctggagtacaactacaacagccacaacgtctatatcatggccgacaagcagaagaacggcatcaaggtgaacttcaagatccgccacaacatcgaggacggcagcgtgcagctcgccgaccactaccagcagaacacccccatcggcgacggccccgtgctgctgcccgacaaccactacctgagcacccagtgcgccctgagcaaagaccccaacgagaagcgcgatcacatggtcctgctggagttcgtgaccgccgccgggatcactctcggcatggacgagctgtacaaggaattctaactagagctcgctgatcagcctcgactgtgccttctagttgccagccatctgttgtttgcccctcccccgtgccttccttgaccctggaaggtgccactcccactgtcctttcctaataaaatgaggaaattgcatcgcattgtctgagtaggtgtcattctattctggggggtggggtggggcaggacagcaagggggaggattgggaagagaatagcaggcatgctggggatcgaagacacagtcggctggtttttttgtttttagcgttataacttttatttcactatgtcactgtatggttgcattttatgtcagtgaatggttgcaggttttttgtaagttattgatatgcctatccagtgtatgtcacgctttgcttgcagcgacaggtaccgagctcgaattcactggccgtcgttttacaacgtcgtgactgggaaaaccctggcgttacccaacttaatcgccttgcagcacatccccctttcgccagctggcgtaatagcgaagaggcccgcaccgatcgcccttcccaacagttgcgcagcctgaatggcgaatggcgcctgatgcggtattttctccttacgcatctgtgcggtatttcacaccgcatatggtgcactctcagtacaatctgctctgatgccgcatagttaagccagccccgacacccgccaacacccgctgacgcgccctgacgggcttgtctgctcccggcatccgcttacagacaagctgtgaccgtctccgggagctgcatgtgtcagaggttttcaccgtcatcaccgaaacgcgcgagacgaaagggcctcgtgatacgcctatttttataggttaatgtcatgataataatggtttcttagacgtcaggtggcacttttcggggaaatgtgcgcggaacccctatttgtttatttttctaaatacattcaaatatgtatccgctcatgagacaataaccctgataaatgcttcaataatattgaaaaaggaagagtatgagtattcaacatttccgtgtcgcccttattcccttttttgcggcattttgccttcctgtttttgctcacccagaaacgctggtgaaagtaaaagatgctgaagatcagttgggtgcacgagtgggttacatcgaactggatctcaacagcggtaagatccttgagagttttcgccccgaagaacgttttccaatgatgagcacttttaaagttctgctatgtggcgcggtattatcccgtattgacgccgggcaagagcaactcggtcgccgcatacactattctcagaatgacttggttgagtactcaccagtcacagaaaagcatcttacggatggcatgacagtaagagaattatgcagtgctgccataaccatgagtgataacactgcggccaacttacttctgacaacgatcggaggaccgaaggagctaaccgcttttttgcacaacatgggggatcatgtaactcgccttgatcgttgggaaccggagctgaatgaagccataccaaacgacgagcgtgacaccacgatgcctgtagcaatggcaacaacgttgcgcaaactattaactggcgaactacttactctagcttcccggcaacaattaatagactggatggaggcggataaagttgcaggaccacttctgcgctcggcccttccggctggctggtttattgctgataaatctggagccggtgagcgtgggtctcgcggtatcattgcagcactggggccagatggtaagccctcccgtatcgtagttatctacacgacggggagtcaggcaactatggatgaacgaaatagacagatcgctgagataggtgcctcactgattaagcattggtaactgtcagaccaagttt

SEQ ID NO: 56 - DNA, 4804 bp, synthetic construct
  source 1..4804: mol_type = other DNA
agttgcgcagcctgaatggcgaatggcgcctgatgcggtattttctccttacgcatctgtgcggtatttcacaccgcatatggtgcactctcagtacaatctgctctgatgccgcatagttaagccagccccgacacccgccaacacccgctgacgcgccctgacgggcttgtctgctcccggcatccgcttacagacaagctgtgaccgtctccgggagctgcatgtgtcagaggttttcaccgtcatcaccgaaacgcgcgagacgaaagggcctcgtgatacgcctatttttataggttaatgtcatgataataatggtttcttagacgtcaggtggcacttttcggggaaatgtgcgcggaacccctatttgtttatttttctaaatacattcaaatatgtatccgctcatgagacaataaccctgataaatgcttcaataatattgaaaaaggaagagtatgagtattcaacatttccgtgtcgcccttattcccttttttgcggcattttgccttcctgtttttgctcacccagaaacgctggtgaaagtaaaagatgctgaagatcagttgggtgcacgagtgggttacatcgaactggatctcaacagcggtaagatccttgagagttttcgccccgaagaacgttttccaatgatgagcacttttaaagttctgctatgtggcgcggtattatcccgtattgacgccgggcaagagcaactcggtcgccgcatacactattctcagaatgacttggttgagtactcaccagtcacagaaaagcatcttacggatggcatgacagtaagagaattatgcagtgctgccataaccatgagtgataacactgcggccaacttacttctgacaacgatcggaggaccgaaggagctaaccgcttttttgcacaacatgggggatcatgtaactcgccttgatcgttgggaaccggagctgaatgaagccataccaaacgacgagcgtgacaccacgatgcctgtagcaatggcaacaacgttgcgcaaactattaactggcgaactacttactctagcttcccggcaacaattaatagactggatggaggcggataaagttgcaggaccacttctgcgctcggcccttccggctggctggtttattgctgataaatctggagccggtgagcgtgggtctcgcggtatcattgcagcactggggccagatggtaagccctcccgtatcgtagttatctacacgacggggagtcaggcaactatggatgaacgaaatagacagatcgctgagataggtgcctcactgattaagcattggtaactgtcagaccaagtttactcatatatactttagattgatttaaaacttcatttttaatttaaaaggatctaggtgaagatcctttttgataatctcatgaccaaaatcccttaacgtgagttttcgttccactgagcgtcagaccccgtagaaaagatcaaaggatcttcttgagatcctttttttctgcgcgtaatctgctgcttgcaaacaaaaaaaccaccgctaccagcggtggtttgtttgccggatcaagagctaccaactctttttccgaaggtaactggcttcagcagagcgcagataccaaatactgttcttctagtgtagccgtagttaggccaccacttcaagaactctgtagcaccgcctacatacctcgctctgctaatcctgttaccagtggctgctgccagtggcgataagtcgtgtcttaccgggttggactcaagacgatagttaccggataaggcgcagcggtcgggctgaacggggggttcgtgcacacagcccagcttggagcgaacgacctacaccgaactgagatacctacagcgtgagctatgagaaagcgccacgcttcccgaagggagaaaggcggacaggtatccggtaagcggcagggtcggaacaggagagcgcacgagggagcttccagggggaaacgcctggtatctttatagtcctgtcgggtttcgccacctctgacttgagcgtcgatttttgtgatgctcgtcaggggggcggagcctatggaaaaacgccagcaacgcggcctttttacggttcctggccttttgctggccttttgctcacatgttctttcctgcgttatcccctgattctgtggataaccgtattaccgcctttgagtgagctgataccgctcgccgcagccgaacgaccgagcgcagcgagtcagtgagcgaggaagcggaagagcgcccaatacgcaaaccgcctctccccgcgcgttggccgattcattaatgcagctggcacgacaggtttcccgactggaaagcgggcagtgagcgcaacgcaattaatgtgagttagctcactcattaggcaccccaggctttacactttatgcttccggctcgtatgttgtgtggaattgtgagcggataacaatttcacacaggaaacagctatgaccatgattacgccaacgtttaataaataataaataataaaataaaaaataaaaaataaataagatacattgatgagtttggacaaaccacaactagaatgcagtgaaaaaaatgctttatttgtgaaatttgtgatgctattgctttatttgtaaccattataagctgcaataaacaagttaagctttgtcgctgcaaccatagtttgacataatgcaaccataccttgacataattaaagtcatactctgacataaagcccactgtctgcgataactgagatgctgacctcttctcttcctcccacagggcctcgagagatctggcagcggagagggcagaggaagtctgctaacatgcggtgacgtcgaggagaatcctggccctaggctcgagatgaccgagtacaagcccacggtgcgcctcgccacccgcgacgacgtccccagggccgtacgcaccctcgccgccgcgttcgccgactaccccgccacgcgccacaccgtcgatccggaccgccacatcgagcgggtcaccgagctgcaagaactcttcctcacgcgcgtcgggctcgacatcggcaaggtgtgggtcgcggacgacggcgccgcggtggcggtctggaccacgccggagagcgtcgaagcgggggcggtgttcgccgagatcggcccgcgcatggccgagttgagcggttcccggctggccgcgcagcaacagatggaaggcctcctggcgccgcaccggcccaaggagcccgcgtggttcctggccaccgtcggagtctcgcccgaccaccagggcaagggtctgggcagcgccgtcgtgctccccggagtggaggcggccgagcgcgccggggtgcccgccttcctggagacctccgcgccccgcaacctccccttctacgagcggctcggcttcaccgtcaccgccgacgtcgaggtgcccgaaggaccgcgcacctggtgcatgacccgcaagcccggtgccggcagtggagagggcagaggaagtctgctaacatgcggtgacgtcgaggagaatcctggcccagtgagcaagggcgaggagctgttcaccggggtggtgcccatcctggtcgagctggacggcgacgtaaacggccacaagttcagcgtgtccggcgagggcgagggcgatgccacctacggcaagctgaccctgaagttcatctgcaccaccggcaagctgcccgtgccctggcccaccctcgtgaccaccctgacctacggcgtgcagtgcttcagccgctaccccgaccacatgaagcagcacgacttcttcaagtccgccatgcccgaaggctacgtccaggagcgcaccatcttcttcaaggacgacggcaactacaagacccgcgccgaggtgaagttcgagggcgacaccctggtgaaccgcatcgagctgaagggcatcgacttcaaggaggacggcaacatcctggggcacaagctggagtacaactacaacagccacaacgtctatatcatggccgacaagcagaagaacggcatcaaggtgaacttcaagatccgccacaacatcgaggacggcagcgtgcagctcgccgaccactaccagcagaacacccccatcggcgacggccccgtgctgctgcccgacaaccactacctgagcacccagtccgccctgagcaaagaccccaacgagaagcgcgatcacatggtcctgctggagttcgtgaccgccgccgggatcactctcggcatggacgagctgtacaaggaattctaactagagctcgctgatcagcctcgactgtgccttctagttgccagccatctgttgtttgcccctcccccgtgccttccttgaccctggaaggtgccactcccactgtcctttcctaataaaatgaggaaattgcatcgcattgtctgagtaggtgtcattctattctggggggtggggtggggcaggacagcaagggggaggattgggaagagaatagcaggcatgctggggatcgaagacacagtcggctggtttttttgtttttagcgttataacttttatttcactatgtcactgtatggttgcattttatgtcagtgaatggttgcaggttttttgtaagttattgatatgcctatccagtgtatgtcacgctttgcttgcagcgacaggtaccgagctcgaattcactggccgtcgttttacaacgtcgtgactgggaaaaccctggcgttacccaacttaatcgccttgcagcacatccccctttcgccagctggcgtaatagcgaagaggcccgcaccgatcgcccttcccaac

SEQ ID NO: 57 - DNA, 4836 bp, synthetic construct
  source 1..4836: mol_type = other DNA
actcatatatactttagattgatttaaaacttcatttttaatttaaaaggatctaggtgaagatcctttttgataatctcatgaccaaaatcccttaacgtgagttttcgttccactgagcgtcagaccccgtagaaaagatcaaaggatcttcttgagatcctttttttctgcgcgtaatctgctgcttgcaaacaaaaaaaccaccgctaccagcggtggtttgtttgccggatcaagagctaccaactctttttccgaaggtaactggcttcagcagagcgcagataccaaatactgttcttctagtgtagccgtagttaggccaccacttcaagaactctgtagcaccgcctacatacctcgctctgctaatcctgttaccagtggctgctgccagtggcgataagtcgtgtcttaccgggttggactcaagacgatagttaccggataaggcgcagcggtcgggctgaacggggggttcgtgcacacagcccagcttggagcgaacgacctacaccgaactgagatacctacagcgtgagctatgagaaagcgccacgcttcccgaagggagaaaggcggacaggtatccggtaagcggcagggtcggaacaggagagcgcacgagggagcttccagggggaaacgcctggtatctttatagtcctgtcgggtttcgccacctctgacttgagcgtcgatttttgtgatgctcgtcaggggggcggagcctatggaaaaacgccagcaacgcggcctttttacggttcctggccttttgctggccttttgctcacatgttctttcctgcgttatcccctgattctgtggataaccgtattaccgcctttgagtgagctgataccgctcgccgcagccgaacgaccgagcgcagcgagtcagtgagcgaggaagcggaagagcgcccaatacgcaaaccgcctctccccgcgcgttggccgattcattaatgcagctggcacgacaggtttcccgactggaaagcgggcagtgagcgcaacgcaattaatgtgagttagctcactcattaggcaccccaggctttacactttatgcttccggctcgtatgttgtgtggaattgtgagcggataacaatttcacacaggaaacagctatgaccatgattacgccaacgtttaataaataataaataataaaataaaaaataaaaaataaataagatacattgatgagtttggacaaaccacaactagaatgcagtgaaaaaaatgctttatttgtgaaatttgtgatgctattgctttatttgtaaccattataagctgcaataaacaagttaagctttgtcgctgcaaccatagtttgacataatgcaaccataccttgacataattaaagtcatactctgacataaagcccccactggattgtacaattacgatcagcatgctgttagcataatgaatcccgtttctgacctcttctcttcctcccacagggcctcgagagatctggcagcggagagggcagaggaagtctgctaacatgcggtgacgtcgaggagaatcctggccctaggctcgagatgaccgagtacaagcccacggtgcgcctcgccacccgcgacgacgtccccagggccgtacgcaccctcgccgccgcgttcgccgactaccccgccacgcgccacaccgtcgatccggaccgccacatcgagcgggtcaccgagctgcaagaactcttcctcacgcgcgtcgggctcgacatcggcaaggtgtgggtcgcggacgacggcgccgcggtggcggtctggaccacgccggagagcgtcgaagcgggggcggtgttcgccgagatcggcccgcgcatggccgagttgagcggttcccggctggccgcgcagcaacagatggaaggcctcctggcgccgcaccggcccaaggagcccgcgtggttcctggccaccgtcggagtctcgcccgaccaccagggcaagggtctgggcagcgccgtcgtgctccccggagtggaggcggccgagcgcgccggggtgcccgccttcctggagacctccgcgccccgcaacctccccttctacgagcggctcggcttcaccgtcaccgccgacgtcgaggtgcccgaaggaccgcgcacctggtgcatgacccgcaagcccggtgccggcagtggagagggcagaggaagtctgctaacatgcggtgacgtcgaggagaatcctggcccagtgagcaagggcgaggagctgttcaccggggtggtgcccatcctggtcgagctggacggcgacgtaaacggccacaagttcagcgtgtccggcgagggcgagggcgatgccacctacggcaagctgaccctgaagttcatctgcaccaccggcaagctgcccgtgccctggcccaccctcgtgaccaccctgacctacggcgtgcagtgcttcagccgctaccccgaccacatgaagcagcacgacttcttcaagtccgccatgcccgaaggctacgtccaggagcgcaccatcttcttcaaggacgacggcaactacaagacccgcgccgaggtgaagttcgagggcgacaccctggtgaaccgcatcgagctgaagggcatcgacttcaaggaggacggcaacatcctggggcacaagctggagtacaactacaacagccacaacgtctatatcatggccgacaagcagaagaacggcatcaaggtgaacttcaagatccgccacaacatcgaggacggcagcgtgcagctcgccgaccactaccagcagaacacccccatcggcgacggccccgtgctgctgcccgacaaccactacctgagcacccagtgcgccctgagcaaagaccccaacgagaagcgcgatcacatggtcctgctggagttcgtgaccgccgccgggatcactctcggcatggacgagctgtacaaggaattctaactagagctcgctgatcagcctcgactgtgccttctagttgccagccatctgttgtttgcccctcccccgtgccttccttgaccctggaaggtgccactcccactgtcctttcctaataaaatgaggaaattgcatcgcattgtctgagtaggtgtcattctattctggggggtggggtggggcaggacagcaagggggaggattgggaagagaatagcaggcatgctggggatcgaagacacagtcggctggtttttttgtttttagcgttataacttttatttcactatgtcactgtatggttgcattttatgtcagtgaatggttgcaggttttttgtaagttattgatatgcctatccagtgtatgtcacgctttgcttgcagcgacaggtaccgagctcgaattcactggccgtcgttttacaacgtcgtgactgggaaaaccctggcgttacccaacttaatcgccttgcagcacatccccctttcgccagctggcgtaatagcgaagaggcccgcaccgatcgcccttcccaacagttgcgcagcctgaatggcgaatggcgcctgatgcggtattttctccttacgcatctgtgcggtatttcacaccgcatatggtgcactctcagtacaatctgctctgatgccgcatagttaagccagccccgacacccgccaacacccgctgacgcgccctgacgggcttgtctgctcccggcatccgcttacagacaagctgtgaccgtctccgggagctgcatgtgtcagaggttttcaccgtcatcaccgaaacgcgcgagacgaaagggcctcgtgatacgcctatttttataggttaatgtcatgataataatggtttcttagacgtcaggtggcacttttcggggaaatgtgcgcggaacccctatttgtttatttttctaaatacattcaaatatgtatccgctcatgagacaataaccctgataaatgcttcaataatattgaaaaaggaagagtatgagtattcaacatttccgtgtcgcccttattcccttttttgcggcattttgccttcctgtttttgctcacccagaaacgctggtgaaagtaaaagatgctgaagatcagttgggtgcacgagtgggttacatcgaactggatctcaacagcggtaagatccttgagagttttcgccccgaagaacgttttccaatgatgagcacttttaaagttctgctatgtggcgcggtattatcccgtattgacgccgggcaagagcaactcggtcgccgcatacactattctcagaatgacttggttgagtactcaccagtcacagaaaagcatcttacggatggcatgacagtaagagaattatgcagtgctgccataaccatgagtgataacactgcggccaacttacttctgacaacgatcggaggaccgaaggagctaaccgcttttttgcacaacatgggggatcatgtaactcgccttgatcgttgggaaccggagctgaatgaagccataccaaacgacgagcgtgacaccacgatgcctgtagcaatggcaacaacgttgcgcaaactattaactggcgaactacttactctagcttcccggcaacaattaatagactggatggaggcggataaagttgcaggaccacttctgcgctcggcccttccggctggctggtttattgctgataaatctggagccggtgagcgtgggtctcgcggtatcattgcagcactggggccagatggtaagccctcccgtatcgtagttatctacacgacggggagtcaggcaactatggatgaacgaaatagacagatcgctgagataggtgcctcactgattaagcattggtaactgtcagaccaagttt

SEQ ID NO: 58 - DNA, 6723 bp, synthetic construct
  source 1..6723: mol_type = other DNA
gacggatcgggagatctcccgatcccctatggtgcactctcagtacaatctgctctgatgccgcatagttaagccagtatctgctccctgcttgtgtgttggaggtcgctgagtagtgcgcgagcaaaatttaagctacaacaaggcaaggcttgaccgacaattgcatgaagaatctgcttagggttaggcgttttgcgctgcttcgcgatgtacgggccagatatacgcgttgacattgattattgactagttattaatagtaatcaattacggggtcattagttcatagcccatatatggagttccgcgttacataacttacggtaaatggcccgcctggctgaccgcccaacgacccccgcccattgacgtcaataatgacgtatgttcccatagtaacgccaatagggactttccattgacgtcaatgggtggagtatttacggtaaactgcccacttggcagtacatcaagtgtatcatatgccaagtacgccccctattgacgtcaatgacggtaaatggcccgcctggcattatgcccagtacatgaccttatgggactttcctacttggcagtacatctacgtattagtcatcgctattaccatggtgatgcggttttggcagtacatcaatgggcgtggatagcggtttgactcacggggatttccaagtctccaccccattgacgtcaatgggagtttgttttggcaccaaaatcaacgggactttccaaaatgtcgtaacaactccgccccattgacgcaaatgggcggtaggcgtgtacggtgggaggtctatataagcagagctctctggctaactagagaacccactgcttactggcttatcgaaattaatacgactcactatagggagacccaagctggctagcgtttaaacttaagcttggtaccgagctcggatccgccaccatgggcaaacggacagccgacggaagcgagttcgagtcaccgaaaaagaagcgaaaagttggctccggaatgacagataaacgcaaagatggctcaggcaaattgctgtattgctctttttgcggcaaaagccagcatgaagtgcgcaagctgattgccggtccatccgtgtatatctgcgacgaatgtgttgatttatgtaacgacatcattcgcgaagagattaaagaagttgcaccgcatcgtgaacgcagtgcgctaccgacgccgcatgaaattcgcaaccacctggacgattacgttatcggccaggaacaggcgaaaaaagtgctggcggtcgcggtatacaaccattacaaacgtctgcgcaacggcgataccagcaatggcgtcgagttgggcaaaagtaacattctgctgatcggtccgaccggttccggtaaaacgctgctggctgaaacgctggcgcgcctgctggatgttccgttcaccatggccgacgcgactacactgaccgaagccggttatgtgggtgaagacgttgaaaacatcattcagaagctgttgcagaaatgcgactacgatgtccagaaagcacagcgtggtattgtctacatcgatgaaatcgacaagatttctcgtaagtcagacaacccgtccattacccgagacgtttccggtgaaggcgtacagcaggcactgttgaaactgatcgaaggtacggtagctgctgttccaccgcaaggtgggcgtaaacatccgcagcaggaattcttgcaggttgatacctctaagatcctgtttatttgtggcggtgcgtttgccggtctggataaagtgatttcccaccgtgtagaaaccggctccggcattggttttggcgcgacggtaaaagcgaagtccgacaaagcaagcgaaggcgagctgctggcgcaggttgaaccggaagatctgatcaagtttggtcttatccctgagtttattggtcgtctgccggttgtcgcaacgttgaatgaactgagcgaagaagctctgattcagatcctcaaagagccgaaaaacgccctgaccaagcagtatcaggcgctgtttaatctggaaggcgtggatctggaattccgtgacgaggcgctggatgctatcgctaagaaagcgatggcgcgtaaaaccggtgcccgtggcctgcgttccatcgtagaagccgcactgctcgataccatgtacgatctgccgtccatggaagacgtcgaaaaagtggttatcgacgagtcggtaattgatggtcaaagcaaaccgttgctgatttatggcaagccggaagcgcaacaggcatctggtgaatgaatctagagggcccgtttaaacccgctgatcagcctcgactgtgccttctagttgccagccatctgttgtttgcccctcccccgtgccttccttgaccctggaaggtgccactcccactgtcctttcctaataaaatgaggaaattgcatcgcattgtctgagtaggtgtcattctattctggggggtggggtggggcaggacagcaagggggaggattgggaagacaatagcaggcatgctggggatgcggtgggctctatggcttctgaggcggaaagaaccagctggggctctagggggtatccccacgcgccctgtagcggcgcattaagcgcggcgggtgtggtggttacgcgcagcgtgaccgctacacttgccagcgccctagcgcccgctcctttcgctttcttcccttcctttctcgccacgttcgccggctttccccgtcaagctctaaatcgggggctccctttagggttccgatttagtgctttacggcacctcgaccccaaaaaacttgattagggtgatggttcacgtagtgggccatcgccctgatagacggtttttcgccctttgacgttggagtccacgttctttaatagtggactcttgttccaaactggaacaacactcaaccctatctcggtctattcttttgatttataagggattttgccgatttcggcctattggttaaaaaatgagctgatttaacaaaaatttaacgcgaattaattctgtggaatgtgtgtcagttagggtgtggaaagtccccaggctccccagcaggcagaagtatgcaaagcatgcatctcaattagtcagcaaccaggtgtggaaagtccccaggctccccagcaggcagaagtatgcaaagcatgcatctcaattagtcagcaaccatagtcccgcccctaactccgcccatcccgcccctaactccgcccagttccgcccattctccgccccatggctgactaattttttttatttatgcagaggccgaggccgcctctgcctctgagctattccagaagtagtgaggaggcttttttggaggcctaggcttttgcaaaaagctcccgggagcttgtatatccattttcggatctgatcaagagacaggatgaggatcgtttcgcatgattgaacaagatggattgcacgcaggttctccggccgcttgggtggagaggctattcggctatgactgggcacaacagacaatcggctgctctgatgccgccgtgttccggctgtcagcgcaggggcgcccggttctttttgtcaagaccgacctgtccggtgccctgaatgaactgcaggacgaggcagcgcggctatcgtggctggccacgacgggcgttccttgcgcagctgtgctcgacgttgtcactgaagcgggaagggactggctgctattgggcgaagtgccggggcaggatctcctgtcatctcaccttgctcctgccgagaaagtatccatcatggctgatgcaatgcggcggctgcatacgcttgatccggctacctgcccattcgaccaccaagcgaaacatcgcatcgagcgagcacgtactcggatggaagccggtcttgtcgatcaggatgatctggacgaagagcatcaggggctcgcgccagccgaactgttcgccaggctcaaggcgcgcatgcccgacggcgaggatctcgtcgtgacccatggcgatgcctgcttgccgaatatcatggtggaaaatggccgcttttctggattcatcgactgtggccggctgggtgtggcggaccgctatcaggacatagcgttggctacccgtgatattgctgaagagcttggcggcgaatgggctgaccgcttcctcgtgctttacggtatcgccgctcccgattcgcagcgcatcgccttctatcgccttcttgacgagttcttctgagcgggactctggggttcgaaatgaccgaccaagcgacgcccaacctgccatcacgagatttcgattccaccgccgccttctatgaaaggttgggcttcggaatcgttttccgggacgccggctggatgatcctccagcgcggggatctcatgctggagttcttcgcccaccccaacttgtttattgcagcttataatggttacaaataaagcaatagcatcacaaatttcacaaataaagcatttttttcactgcattctagttgtggtttgtccaaactcatcaatgtatcttatcatgtctgtataccgtcgacctctagctagagcttggcgtaatcatggtcatagctgtttcctgtgtgaaattgttatccgctcacaattccacacaacatacgagccggaagcataaagtgtaaagcctggggtgcctaatgagtgagctaactcacattaattgcgttgcgctcactgcccgctttccagtcgggaaacctgtcgtgccagctgcattaatgaatcggccaacgcgcggggagaggcggtttgcgtattgggcgctcttccgcttcctcgctcactgactcgctgcgctcggtcgttcggctgcggcgagcggtatcagctcactcaaaggcggtaatacggttatccacagaatcaggggataacgcaggaaagaacatgtgagcaaaaggccagcaaaaggccaggaaccgtaaaaaggccgcgttgctggcgtttttccataggctccgcccccctgacgagcatcacaaaaatcgacgctcaagtcagaggtggcgaaacccgacaggactataaagataccaggcgtttccccctggaagctccctcgtgcgctctcctgttccgaccctgccgcttaccggatacctgtccgcctttctcccttcgggaagcgtggcgctttctcatagctcacgctgtaggtatctcagttcggtgtaggtcgttcgctccaagctgggctgtgtgcacgaaccccccgttcagcccgaccgctgcgccttatccggtaactatcgtcttgagtccaacccggtaagacacgacttatcgccactggcagcagccactggtaacaggattagcagagcgaggtatgtaggcggtgctacagagttcttgaagtggtggcctaactacggctacactagaagaacagtatttggtatctgcgctctgctgaagccagttaccttcggaaaaagagttggtagctcttgatccggcaaacaaaccaccgctggtagcggtttttttgtttgcaagcagcagattacgcgcagaaaaaaaggatctcaagaagatcctttgatcttttctacggggtctgacgctcagtggaacgaaaactcacgttaagggattttggtcatgagattatcaaaaaggatcttcacctagatccttttaaattaaaaatgaagttttaaatcaatctaaagtatatatgagtaaacttggtctgacagttaccaatgcttaatcagtgaggcacctatctcagcgatctgtctatttcgttcatccatagttgcctgactccccgtcgtgtagataactacgatacgggagggcttaccatctggccccagtgctgcaatgataccgcgagacccacgctcaccggctccagatttatcagcaataaaccagccagccggaagggccgagcgcagaagtggtcctgcaactttatccgcctccatccagtctattaattgttgccgggaagctagagtaagtagttcgccagttaatagtttgcgcaacgttgttgccattgctacaggcatcgtggtgtcacgctcgtcgtttggtatggcttcattcagctccggttcccaacgatcaaggcgagttacatgatcccccatgttgtgcaaaaaagcggttagctccttcggtcctccgatcgttgtcagaagtaagttggccgcagtgttatcactcatggttatggcagcactgcataattctcttactgtcatgccatccgtaagatgcttttctgtgactggtgagtactcaaccaagtcattctgagaatagtgtatgcggcgaccgagttgctcttgcccggcgtcaatacgggataataccgcgccacatagcagaactttaaaagtgctcatcattggaaaacgttcttcggggcgaaaactctcaaggatcttaccgctgttgagatccagttcgatgtaacccactcgtgcacccaactgatcttcagcatcttttactttcaccagcgtttctgggtgagcaaaaacaggaaggcaaaatgccgcaaaaaagggaataagggcgacacggaaatgttgaatactcatactcttcctttttcaatattattgaagcatttatcagggttattgtctcatgagcggatacatatttgaatgtatttagaaaaataaacaaataggggttccgcgcacatttccccgaaaagtgccacctgacgtc

SEQ ID NO: 59 - DNA, 6704 bp, synthetic construct
  source 1..6704: mol_type = other DNA
gacggatcgggagatctcccgatcccctatggtgcactctcagtacaatctgctctgatgccgcatagttaagccagtatctgctccctgcttgtgtgttggaggtcgctgagtagtgcgcgagcaaaatttaagctacaacaaggcaaggcttgaccgacaattgcatgaagaatctgcttagggttaggcgttttgcgctgcttcgcgatgtacgggccagatatacgcgttgacattgattattgactagttattaatagtaatcaattacggggtcattagttcatagcccatatatggagttccgcgttacataacttacggtaaatggcccgcctggctgaccgcccaacgacccccgcccattgacgtcaataatgacgtatgttcccatagtaacgccaatagggactttccattgacgtcaatgggtggagtatttacggtaaactgcccacttggcagtacatcaagtgtatcatatgccaagtacgccccctattgacgtcaatgacggtaaatggcccgcctggcattatgcccagtacatgaccttatgggactttcctacttggcagtacatctacgtattagtcatcgctattaccatggtgatgcggttttggcagtacatcaatgggcgtggatagcggtttgactcacggggatttccaagtctccaccccattgacgtcaatgggagtttgttttggcaccaaaatcaacgggactttccaaaatgtcgtaacaactccgccccattgacgcaaatgggcggtaggcgtgtacggtgggaggtctatataagcagagctctctggctaactagagaacccactgcttactggcttatcgaaattaatacgactcactatagggagacccaagctggctagcgtttaaacttaagcttgccaccatgggcatgacagataaacgcaaagatggctcaggcaaattgctgtattgctctttttgcggcaaaagccagcatgaagtgcgcaagctgattgccggtccatccgtgtatatctgcgacgaatgtgttgatttatgtaacgacatcattcgcgaagagattaaagaagttgcaccgcatcgtgaacgcagtgcgctaccgacgccgcatgaaattcgcaaccacctggacgattacgttatcggccaggaacaggcgaaaaaagtgctggcggtcgcggtatacaaccattacaaacgtctgcgcaacggcgataccagcaatggcgtcgagttgggcaaaagtaacattctgctgatcggtccgaccggttccggtaaaacgctgctggctgaaacgctggcgcgcctgctggatgttccgttcaccatggccgacgcgactacactgaccgaagccggttatgtgggtgaagacgttgaaaacatcattcagaagctgttgcagaaatgcgactacgatgtccagaaagcacagcgtggtattgtctacatcgatgaaatcgacaagatttctcgtaagtcagacaacccgtccattacccgagacgtttccggtgaaggcgtacagcaggcactgttgaaactgatcgaaggtacggtagctgctgttccaccgcaaggtgggcgtaaacatccgcagcaggaattcttgcaggttgatacctctaagatcctgtttatttgtggcggtgcgtttgccggtctggataaagtgatttcccaccgtgtagaaaccggctccggcattggttttggcgcgacggtaaaagcgaagtccgacaaagcaagcgaaggcgagctgctggcgcaggttgaaccggaagatctgatcaagtttggtcttatccctgagtttattggtcgtctgccggttgtcgcaacgttgaatgaactgagcgaagaagctctgattcagatcctcaaagagccgaaaaacgccctgaccaagcagtatcaggcgctgtttaatctggaaggcgtggatctggaattccgtgacgaggcgctggatgctatcgctaagaaagcgatggcgcgtaaaaccggtgcccgtggcctgcgttccatcgtagaagccgcactgctcgataccatgtacgatctgccgtccatggaagacgtcgaaaaagtggttatcgacgagtcggtaattgatggtcaaagcaaaccgttgctgatttatggcaagccggaagcgcaacaggcatctggtgaaggctccggaaaacggacagccgacggaagcgagttcgagtcaccgaaaaagaagcgaaaagtttaatctagagggcccgtttaaacccgctgatcagcctcgactgtgccttctagttgccagccatctgttgtttgcccctcccccgtgccttccttgaccctggaaggtgccactcccactgtcctttcctaataaaatgaggaaattgcatcgcattgtctgagtaggtgtcattctattctggggggtggggtggggcaggacagcaagggggaggattgggaagacaatagcaggcatgctggggatgcggtgggctctatggcttctgaggcggaaagaaccagctggggctctagggggtatccccacgcgccctgtagcggcgcattaagcgcggcgggtgtggtggttacgcgcagcgtgaccgctacacttgccagcgccctagcgcccgctcctttcgctttcttcccttcctttctcgccacgttcgccggctttccccgtcaagctctaaatcgggggctccctttagggttccgatttagtgctttacggcacctcgaccccaaaaaacttgattagggtgatggttcacgtagtgggccatcgccctgatagacggtttttcgccctttgacgttggagtccacgttctttaatagtggactcttgttccaaactggaacaacactcaaccctatctcggtctattcttttgatttataagggattttgccgatttcggcctattggttaaaaaatgagctgatttaacaaaaatttaacgcgaattaattctgtggaatgtgtgtcagttagggtgtggaaagtccccaggctccccagcaggcagaagtatgcaaagcatgcatctcaattagtcagcaaccaggtgtggaaagtccccaggctccccagcaggcagaagtatgcaaagcatgcatctcaattagtcagcaaccatagtcccgcccctaactccgcccatcccgcccctaactccgcccagttccgcccattctccgccccatggctgactaattttttttatttatgcagaggccgaggccgcctctgcctctgagctattccagaagtagtgaggaggcttttttggaggcctaggcttttgcaaaaagctcccgggagcttgtatatccattttcggatctgatcaagagacaggatgaggatcgtttcgcatgattgaacaagatggattgcacgcaggttctccggccgcttgggtggagaggctattcggctatgactgggcacaacagacaatcggctgctctgatgccgccgtgttccggctgtcagcgcaggggcgcccggttctttttgtcaagaccgacctgtccggtgccctgaatgaactgcaggacgaggcagcgcggctatcgtggctggccacgacgggcgttccttgcgcagctgtgctcgacgttgtcactgaagcgggaagggactggctgctattgggcgaagtgccggggcaggatctcctgtcatctcaccttgctcctgccgagaaagtatccatcatggctgatgcaatgcggcggctgcatacgcttgatccggctacctgcccattcgaccaccaagcgaaacatcgcatcgagcgagcacgtactcggatggaagccggtcttgtcgatcaggatgatctggacgaagagcatcaggggctcgcgccagccgaactgttcgccaggctcaaggcgcgcatgcccgacggcgaggatctcgtcgtgacccatggcgatgcctgcttgccgaatatcatggtggaaaatggccgcttttctggattcatcgactgtggccggctgggtgtggcggaccgctatcaggacatagcgttggctacccgtgatattgctgaagagcttggcggcgaatgggctgaccgcttcctcgtgctttacggtatcgccgctcccgattcgcagcgcatcgccttctatcgccttcttgacgagttcttctgagcgggactctggggttcgaaatgaccgaccaagcgacgcccaacctgccatcacgagatttcgattccaccgccgccttctatgaaaggttgggcttcggaatcgttttccgggacgccggctggatgatcctccagcgcggggatctcatgctggagttcttcgcccaccccaacttgtttattgcagcttataatggttacaaataaagcaatagcatcacaaatttcacaaataaagcatttttttcactgcattctagttgtggtttgtccaaactcatcaatgtatcttatcatgtctgtataccgtcgacctctagctagagcttggcgtaatcatggtcatagctgtttcctgtgtgaaattgttatccgctcacaattccacacaacatacgagccggaagcataaagtgtaaagcctggggtgcctaatgagtgagctaactcacattaattgcgttgcgctcactgcccgctttccagtcgggaaacctgtcgtgccagctgcattaatgaatcggccaacgcgcggggagaggcggtttgcgtattgggcgctcttccgcttcctcgctcactgactcgctgcgctcggtcgttcggctgcggcgagcggtatcagctcactcaaaggcggtaatacggttatccacagaatcaggggataacgcaggaaagaacatgtgagcaaaaggccagcaaaaggccaggaaccgtaaaaaggccgcgttgctggcgtttttccataggctccgcccccctgacgagcatcacaaaaatcgacgctcaagtcagaggtggcgaaacccgacaggactataaagataccaggcgtttccccctggaagctccctcgtgcgctctcctgttccgaccctgccgcttaccggatacctgtccgcctttctcccttcgggaagcgtggcgctttctcatagctcacgctgtaggtatctcagttcggtgtaggtcgttcgctccaagctgggctgtgtgcacgaaccccccgttcagcccgaccgctgcgccttatccggtaactatcgtcttgagtccaacccggtaagacacgacttatcgccactggcagcagccactggtaacaggattagcagagcgaggtatgtaggcggtgctacagagttcttgaagtggtggcctaactacggctacactagaagaacagtatttggtatctgcgctctgctgaagccagttaccttcggaaaaagagttggtagctcttgatccggcaaacaaaccaccgctggtagcggtttttttgtttgcaagcagcagattacgcgcagaaaaaaaggatctcaagaagatcctttgatcttttctacggggtctgacgctcagtggaacgaaaactcacgttaagggattttggtcatgagattatcaaaaaggatcttcacctagatccttttaaattaaaaatgaagttttaaatcaatctaaagtatatatgagtaaacttggtctgacagttaccaatgcttaatcagtgaggcacctatctcagcgatctgtctatttcgttcatccatagttgcctgactccccgtcgtgtagataactacgatacgggagggcttaccatctggccccagtgctgcaatgataccgcgagacccacgctcaccggctccagatttatcagcaataaaccagccagccggaagggccgagcgcagaagtggtcctgcaactttatccgcctccatccagtctattaattgttgccgggaagctagagtaagtagttcgccagttaatagtttgcgcaacgttgttgccattgctacaggcatcgtggtgtcacgctcgtcgtttggtatggcttcattcagctccggttcccaacgatcaaggcgagttacatgatcccccatgttgtgcaaaaaagcggttagctccttcggtcctccgatcgttgtcagaagtaagttggccgcagtgttatcactcatggttatggcagcactgcataattctcttactgtcatgccatccgtaagatgcttttctgtgactggtgagtactcaaccaagtcattctgagaatagtgtatgcggcgaccgagttgctcttgcccggcgtcaatacgggataataccgcgccacatagcagaactttaaaagtgctcatcattggaaaacgttcttcggggcgaaaactctcaaggatcttaccgctgttgagatccagttcgatgtaacccactcgtgcacccaactgatcttcagcatcttttactttcaccagcgtttctgggtgagcaaaaacaggaaggcaaaatgccgcaaaaaagggaataagggcgacacggaaatgttgaatactcatactcttcctttttcaatattattgaagcatttatcagggttattgtctcatgagcggatacatatttgaatgtatttagaaaaataaacaaataggggttccgcgcacatttccccgaaaagtgccacctgacgtc

SEQ ID NO: 60 - DNA, 6723 bp, synthetic construct
  source 1..6723: mol_type = other DNA
gacggatcgggagatctcccgatcccctatggtgcactctcagtacaatctgctctgatgccgcatagttaagccagtatctgctccctgcttgtgtgttggaggtcgctgagtagtgcgcgagcaaaatttaagctacaacaaggcaaggcttgaccgacaattgcatgaagaatctgcttagggttaggcgttttgcgctgcttcgcgatgtacgggccagatatacgcgttgacattgattattgactagttattaatagtaatcaattacggggtcattagttcatagcccatatatggagttccgcgttacataacttacggtaaatggcccgcctggctgaccgcccaacgacccccgcccattgacgtcaataatgacgtatgttcccatagtaacgccaatagggactttccattgacgtcaatgggtggagtatttacggtaaactgcccacttggcagtacatcaagtgtatcatatgccaagtacgccccctattgacgtcaatgacggtaaatggcccgcctggcattatgcccagtacatgaccttatgggactttcctacttggcagtacatctacgtattagtcatcgctattaccatggtgatgcggttttggcagtacatcaatgggcgtggatagcggtttgactcacggggatttccaagtctccaccccattgacgtcaatgggagtttgttttggcaccaaaatcaacgggactttccaaaatgtcgtaacaactccgccccattgacgcaaatgggcggtaggcgtgtacggtgggaggtctatataagcagagctctctggctaactagagaacccactgcttactggcttatcgaaattaatacgactcactatagggagacccaagctggctagcgtttaaacttaagcttggtaccgagctcggatccgccaccatgggcaaacggacagccgacggaagcgagttcgagtcaccgaaaaagaagcgaaaagttggctccggaatgaccgacaagcggaaggacggctctggcaagctgctgtactgcagcttctgcggcaaatctcagcacgaggtgcggaagctgatcgccggacctagcgtgtatatctgtgatgagtgcgtggatctgtgcaacgacatcatccgggaagaaatcaaggaagtggcccctcacagggagcggagcgccctgcctacaccacatgagatcagaaatcacctggatgattacgtgatcggccaggagcaggctaaaaaggtcctggccgtggccgtgtacaaccactacaagagactgcgcaacggcgacaccagcaatggcgtggagctgggcaagagcaacatcctgctgattggccctaccggaagcggaaagacactgctggctgaaaccctggccagactgctggacgtgcctttcacaatggccgacgccacaacactgaccgaggctggctacgtgggcgaggacgtggagaacatcatccagaagctgcttcagaagtgtgactacgacgtgcagaaagcccagagaggcatcgtgtacatcgacgagatcgataagatcagcagaaagtccgacaaccccagcatcacccgggacgtgagcggcgagggcgttcagcaggccctgctgaagctgatcgaggggaccgtggccgctgtgcccccccagggcggaagaaagcaccctcagcaagagttcctgcaagtggacaccagcaagatcctgttcatctgcggcggcgccttcgccggcctggacaaagtgatctcccaccgggtggagacaggatctggaatcggcttcggcgccaccgtgaaggccaagtctgataaagccagcgagggcgaactgctcgctcaagtggaacccgaggacctgatcaagttcggcctgatccctgagttcatcggcagactgccagtggtggctacactcaacgagctgagcgaggaagcactgattcagatcctgaaagagcctaagaacgccctgaccaagcagtaccaggccctgtttaacctggaaggcgtggacctggaatttagagatgaggccctcgacgccatcgccaagaaggctatggccagaaagaccggcgctcggggcctgagaagcatcgtggaagccgccctgctggatacaatgtacgacctgcccagcatggaagatgtggaaaaggtcgtgatcgacgagagcgttatcgacggccagagcaagcctctgctgatctacggcaaacctgaagcccagcaggcttctggcgagtgaatctagagggcccgtttaaacccgctgatcagcctcgactgtgccttctagttgccagccatctgttgtttgcccctcccccgtgccttccttgaccctggaaggtgccactcccactgtcctttcctaataaaatgaggaaattgcatcgcattgtctgagtaggtgtcattctattctggggggtggggtggggcaggacagcaagggggaggattgggaagacaatagcaggcatgctggggatgcggtgggctctatggcttctgaggcggaaagaaccagctggggctctagggggtatccccacgcgccctgtagcggcgcattaagcgcggcgggtgtggtggttacgcgcagcgtgaccgctacacttgccagcgccctagcgcccgctcctttcgctttcttcccttcctttctcgccacgttcgccggctttccccgtcaagctctaaatcgggggctccctttagggttccgatttagtgctttacggcacctcgaccccaaaaaacttgattagggtgatggttcacgtagtgggccatcgccctgatagacggtttttcgccctttgacgttggagtccacgttctttaatagtggactcttgttccaaactggaacaacactcaaccctatctcggtctattcttttgatttataagggattttgccgatttcggcctattggttaaaaaatgagctgatttaacaaaaatttaacgcgaattaattctgtggaatgtgtgtcagttagggtgtggaaagtccccaggctccccagcaggcagaagtatgcaaagcatgcatctcaattagtcagcaaccaggtgtggaaagtccccaggctccccagcaggcagaagtatgcaaagcatgcatctcaattagtcagcaaccatagtcccgcccctaactccgcccatcccgcccctaactccgcccagttccgcccattctccgccccatggctgactaattttttttatttatgcagaggccgaggccgcctctgcctctgagctattccagaagtagtgaggaggcttttttggaggcctaggcttttgcaaaaagctcccgggagcttgtatatccattttcggatctgatcaagagacaggatgaggatcgtttcgcatgattgaacaagatggattgcacgcaggttctccggccgcttgggtggagaggctattcggctatgactgggcacaacagacaatcggctgctctgatgccgccgtgttccggctgtcagcgcaggggcgcccggttctttttgtcaagaccgacctgtccggtgccctgaatgaactgcaggacgaggcagcgcggctatcgtggctggccacgacgggcgttccttgcgcagctgtgctcgacgttgtcactgaagcgggaagggactggctgctattgggcgaagtgccggggcaggatctcctgtcatctcaccttgctcctgccgagaaagtatccatcatggctgatgcaatgcggcggctgcatacgcttgatccggctacctgcccattcgaccaccaagcgaaacatcgcatcgagcgagcacgtactcggatggaagccggtcttgtcgatcaggatgatctggacgaagagcatcaggggctcgcgccagccgaactgttcgccaggctcaaggcgcgcatgcccgacggcgaggatctcgtcgtgacccatggcgatgcctgcttgccgaatatcatggtggaaaatggccgcttttctggattcatcgactgtggccggctgggtgtggcggaccgctatcaggacatagcgttggctacccgtgatattgctgaagagcttggcggcgaatgggctgaccgcttcctcgtgctttacggtatcgccgctcccgattcgcagcgcatcgccttctatcgccttcttgacgagttcttctgagcgggactctggggttcgaaatgaccgaccaagcgacgcccaacctgccatcacgagatttcgattccaccgccgccttctatgaaaggttgggcttcggaatcgttttccgggacgccggctggatgatcctccagcgcggggatctcatgctggagttcttcgcccaccccaacttgtttattgcagcttataatggttacaaataaagcaatagcatcacaaatttcacaaataaagcatttttttcactgcattctagttgtggtttgtccaaactcatcaatgtatcttatcatgtctgtataccgtcgacctctagctagagcttggcgtaatcatggtcatagctgtttcctgtgtgaaattgttatccgctcacaattccacacaacatacgagccggaagcataaagtgtaaagcctggggtgcctaatgagtgagctaactcacattaattgcgttgcgctcactgcccgctttccagtcgggaaacctgtcgtgccagctgcattaatgaatcggccaacgcgcggggagaggcggtttgcgtattgggcgctcttccgcttcctcgctcactgactcgctgcgctcggtcgttcggctgcggcgagcggtatcagctcactcaaaggcggtaatacggttatccacagaatcaggggataacgcaggaaagaacatgtgagcaaaaggccagcaaaaggccaggaaccgtaaaaaggccgcgttgctggcgtttttccataggctccgcccccctgacgagcatcacaaaaatcgacgctcaagtcagaggtggcgaaacccgacaggactataaagataccaggcgtttccccctggaagctccctcgtgcgctctcctgttccgaccctgccgcttaccggatacctgtccgcctttctcccttcgggaagcgtggcgctttctcatagctcacgctgtaggtatctcagttcggtgtaggtcgttcgctccaagctgggctgtgtgcacgaaccccccgttcagcccgaccgctgcgccttatccggtaactatcgtcttgagtccaacccggtaagacacgacttatcgccactggcagcagccactggtaacaggattagcagagcgaggtatgtaggcggtgctacagagttcttgaagtggtggcctaactacggctacactagaagaacagtatttggtatctgcgctctgctgaagccagttaccttcggaaaaagagttggtagctcttgatccggcaaacaaaccaccgctggtagcggtttttttgtttgcaagcagcagattacgcgcagaaaaaaaggatctcaagaagatcctttgatcttttctacggggtctgacgctcagtggaacgaaaactcacgttaagggattttggtcatgagattatcaaaaaggatcttcacctagatccttttaaattaaaaatgaagttttaaatcaatctaaagtatatatgagtaaacttggtctgacagttaccaatgcttaatcagtgaggcacctatctcagcgatctgtctatttcgttcatccatagttgcctgactccccgtcgtgtagataactacgatacgggagggcttaccatctggccccagtgctgcaatgataccgcgagacccacgctcaccggctccagatttatcagcaataaaccagccagccggaagggccgagcgcagaagtggtcctgcaactttatccgcctccatccagtctattaattgttgccgggaagctagagtaagtagttcgccagttaatagtttgcgcaacgttgttgccattgctacaggcatcgtggtgtcacgctcgtcgtttggtatggcttcattcagctccggttcccaacgatcaaggcgagttacatgatcccccatgttgtgcaaaaaagcggttagctccttcggtcctccgatcgttgtcagaagtaagttggccgcagtgttatcactcatggttatggcagcactgcataattctcttactgtcatgccatccgtaagatgcttttctgtgactggtgagtactcaaccaagtcattctgagaatagtgtatgcggcgaccgagttgctcttgcccggcgtcaatacgggataataccgcgccacatagcagaactttaaaagtgctcatcattggaaaacgttcttcggggcgaaaactctcaaggatcttaccgctgttgagatccagttcgatgtaacccactcgtgcacccaactgatcttcagcatcttttactttcaccagcgtttctgggtgagcaaaaacaggaaggcaaaatgccgcaaaaaagggaataagggcgacacggaaatgttgaatactcatactcttcctttttcaatattattgaagcatttatcagggttattgtctcatgagcggatacatatttgaatgtatttagaaaaataaacaaataggggttccgcgcacatttccccgaaaagtgccacctgacgtc

SEQ ID NO: 61 - DNA, 6732 bp, synthetic construct
  source 1..6732: mol_type = other DNA
gacggatcgggagatctcccgatcccctatggtgcactctcagtacaatctgctctgatgccgcatagttaagccagtatctgctccctgcttgtgtgttggaggtcgctgagtagtgcgcgagcaaaatttaagctacaacaaggcaaggcttgaccgacaattgcatgaagaatctgcttagggttaggcgttttgcgctgcttcgcgatgtacgggccagatatacgcgttgacattgattattgactagttattaatagtaatcaattacggggtcattagttcatagcccatatatggagttccgcgttacataacttacggtaaatggcccgcctggctgaccgcccaacgacccccgcccattgacgtcaataatgacgtatgttcccatagtaacgccaatagggactttccattgacgtcaatgggtggagtatttacggtaaactgcccacttggcagtacatcaagtgtatcatatgccaagtacgccccctattgacgtcaatgacggtaaatggcccgcctggcattatgcccagtacatgaccttatgggactttcctacttggcagtacatctacgtattagtcatcgctattaccatggtgatgcggttttggcagtacatcaatgggcgtggatagcggtttgactcacggggatttccaagtctccaccccattgacgtcaatgggagtttgttttggcaccaaaatcaacgggactttccaaaatgtcgtaacaactccgccccattgacgcaaatgggcggtaggcgtgtacggtgggaggtctatataagcagagctctctggctaactagagaacccactgcttactggcttatcgaaattaatacgactcactatagggagacccaagctggctagcgtttaaacttaagcttggtaccgagctcggatccgccaccatgggcaaacggacagccgacggaagcgagttcgagtcaccgaaaaagaagcgaaaagttggctccggaatgagcgatacccctacagacggcgacaagtccaacaagctgctgtactgtagcttctgcggcaagtctcagcacgaggtgcggaagctgatcgccggacctagcgtgtacatctgtgacgagtgcgtggaactgtgcaacgacattatccgcgaggaaatcaaggacatcgcccctaagcacaacagcagcgacaagctgcctgtgcctaaggaaatcagaaaccatctggacgattacgtgatcggccaggatcacgccaagaaagtgctgtctgtggccgtgtacaaccactacaagcggctgagaaaccagagcaccaaacaggaggtggaactgggcaagagcaatatcctgctcatcggccctaccggcagcggaaaaaccctcctggctgaaaccctggccagactcctggatgtgccattcacaatggccgacgccaccaccctgacagaggccggctacgtgggcgaggacgtggaaaacatcatccagaagctgctgcagaaatgcgactacgacgtggagaaggcccagcgggggatcgtgtatatcgacgagatcgacaaaatcagcaggaaaagcgacaaccccagcatcaccagagatgtatctggcgagggagtgcagcaggccctgctgaagctgatcgagggtacagtggcctctgtccccccccagggcggcagaaagcacccccagcaagagtttctgcaagtggacacaagcaagatcctgtttatctgcggcggagccttcgccggcctggacaaggtgatcgagcagagatcccacaagaataccggcatcggcttcggcgtgaacgtgaaggaaagcgccagtagcagaagcctgtccgagacattcaaggacgtggaacctgaggacctggtgaaatacggccttattcctgagttcatcggcagactgccagtggttgctacactgaccgagctggacgaggccgctctggtccagatcctgagcgagcctaagaacgccatcaccaagcagttcagcgtcctgttcggcatggaagatgttgagctggagttcagagatgatgccctgagcgctattgcccacaaagctatggagagaaagaccggagctagaggcctgcggagcatcgtggaaggcgtgctgctcgatacaatgtacgagctgcctagcatggacgacgtgtccaaggtggtgatcgacgaaaccgtgatcaagggcgaatctgaccccatcctgatctacgagaacaacaatcaagataaggccgccagcgagtgaatctagagggcccgtttaaacccgctgatcagcctcgactgtgccttctagttgccagccatctgttgtttgcccctcccccgtgccttccttgaccctggaaggtgccactcccactgtcctttcctaataaaatgaggaaattgcatcgcattgtctgagtaggtgtcattctattctggggggtggggtggggcaggacagcaagggggaggattgggaagacaatagcaggcatgctggggatgcggtgggctctatggcttctgaggcggaaagaaccagctggggctctagggggtatccccacgcgccctgtagcggcgcattaagcgcggcgggtgtggtggttacgcgcagcgtgaccgctacacttgccagcgccctagcgcccgctcctttcgctttcttcccttcctttctcgccacgttcgccggctttccccgtcaagctctaaatcgggggctccctttagggttccgatttagtgctttacggcacctcgaccccaaaaaacttgattagggtgatggttcacgtagtgggccatcgccctgatagacggtttttcgccctttgacgttggagtccacgttctttaatagtggactcttgttccaaactggaacaacactcaaccctatctcggtctattcttttgatttataagggattttgccgatttcggcctattggttaaaaaatgagctgatttaacaaaaatttaacgcgaattaattctgtggaatgtgtgtcagttagggtgtggaaagtccccaggctccccagcaggcagaagtatgcaaagcatgcatctcaattagtcagcaaccaggtgtggaaagtccccaggctccccagcaggcagaagtatgcaaagcatgcatctcaattagtcagcaaccatagtcccgcccctaactccgcccatcccgcccctaactccgcccagttccgcccattctccgccccatggctgactaattttttttatttatgcagaggccgaggccgcctctgcctctgagctattccagaagtagtgaggaggcttttttggaggcctaggcttttgcaaaaagctcccgggagcttgtatatccattttcggatctgatcaagagacaggatgaggatcgtttcgcatgattgaacaagatggattgcacgcaggttctccggccgcttgggtggagaggctattcggctatgactgggcacaacagacaatcggctgctctgatgccgccgtgttccggctgtcagcgcaggggcgcccggttctttttgtcaagaccgacctgtccggtgccctgaatgaactgcaggacgaggcagcgcggctatcgtggctggccacgacgggcgttccttgcgcagctgtgctcgacgttgtcactgaagcgggaagggactggctgctattgggcgaagtgccggggcaggatctcctgtcatctcaccttgctcctgccgagaaagtatccatcatggctgatgcaatgcggcggctgcatacgcttgatccggctacctgcccattcgaccaccaagcgaaacatcgcatcgagcgagcacgtactcggatggaagccggtcttgtcgatcaggatgatctggacgaagagcatcaggggctcgcgccagccgaactgttcgccaggctcaaggcgcgcatgcccgacggcgaggatctcgtcgtgacccatggcgatgcctgcttgccgaatatcatggtggaaaatggccgcttttctggattcatcgactgtggccggctgggtgtggcggaccgctatcaggacatagcgttggctacccgtgatattgctgaagagcttggcggcgaatgggctgaccgcttcctcgtgctttacggtatcgccgctcccgattcgcagcgcatcgccttctatcgccttcttgacgagttcttctgagcgggactctggggttcgaaatgaccgaccaagcgacgcccaacctgccatcacgagatttcgattccaccgccgccttctatgaaaggttgggcttcggaatcgttttccgggacgccggctggatgatcctccagcgcggggatctcatgctggagttcttcgcccaccccaacttgtttattgcagcttataatggttacaaataaagcaatagcatcacaaatttcacaaataaagcatttttttcactgcattctagttgtggtttgtccaaactcatcaatgtatcttatcatgtctgtataccgtcgacctctagctagagcttggcgtaatcatggtcatagctgtttcctgtgtgaaattgttatccgctcacaattccacacaacatacgagccggaagcataaagtgtaaagcctggggtgcctaatgagtgagctaactcacattaattgcgttgcgctcactgcccgctttccagtcgggaaacctgtcgtgccagctgcattaatgaatcggccaacgcgcggggagaggcggtttgcgtattgggcgctcttccgcttcctcgctcactgactcgctgcgctcggtcgttcggctgcggcgagcggtatcagctcactcaaaggcggtaatacggttatccacagaatcaggggataacgcaggaaagaacatgtgagcaaaaggccagcaaaaggccaggaaccgtaaaaaggccgcgttgctggcgtttttccataggctccgcccccctgacgagcatcacaaaaatcgacgctcaagtcagaggtggcgaaacccgacaggactataaagataccaggcgtttccccctggaagctccctcgtgcgctctcctgttccgaccctgccgcttaccggatacctgtccgcctttctcccttcgggaagcgtggcgctttctcatagctcacgctgtaggtatctcagttcggtgtaggtcgttcgctccaagctgggctgtgtgcacgaaccccccgttcagcccgaccgctgcgccttatccggtaactatcgtcttgagtccaacccggtaagacacgacttatcgccactggcagcagccactggtaacaggattagcagagcgaggtatgtaggcggtgctacagagttcttgaagtggtggcctaactacggctacactagaagaacagtatttggtatctgcgctctgctgaagccagttaccttcggaaaaagagttggtagctcttgatccggcaaacaaaccaccgctggtagcggtttttttgtttgcaagcagcagattacgcgcagaaaaaaaggatctcaagaagatcctttgatcttttctacggggtctgacgctcagtggaacgaaaactcacgttaagggattttggtcatgagattatcaaaaaggatcttcacctagatccttttaaattaaaaatgaagttttaaatcaatctaaagtatatatgagtaaacttggtctgacagttaccaatgcttaatcagtgaggcacctatctcagcgatctgtctatttcgttcatccatagttgcctgactccccgtcgtgtagataactacgatacgggagggcttaccatctggccccagtgctgcaatgataccgcgagacccacgctcaccggctccagatttatcagcaataaaccagccagccggaagggccgagcgcagaagtggtcctgcaactttatccgcctccatccagtctattaattgttgccgggaagctagagtaagtagttcgccagttaatagtttgcgcaacgttgttgccattgctacaggcatcgtggtgtcacgctcgtcgtttggtatggcttcattcagctccggttcccaacgatcaaggcgagttacatgatcccccatgttgtgcaaaaaagcggttagctccttcggtcctccgatcgttgtcagaagtaagttggccgcagtgttatcactcatggttatggcagcactgcataattctcttactgtcatgccatccgtaagatgcttttctgtgactggtgagtactcaaccaagtcattctgagaatagtgtatgcggcgaccgagttgctcttgcccggcgtcaatacgggataataccgcgccacatagcagaactttaaaagtgctcatcattggaaaacgttcttcggggcgaaaactctcaaggatcttaccgctgttgagatccagttcgatgtaacccactcgtgcacccaactgatcttcagcatcttttactttcaccagcgtttctgggtgagcaaaaacaggaaggcaaaatgccgcaaaaaagggaataagggcgacacggaaatgttgaatactcatactcttcctttttcaatattattgaagcatttatcagggttattgtctcatgagcggatacatatttgaatgtatttagaaaaataaacaaataggggttccgcgcacatttccccgaaaagtgccacctgacgtc

SEQ ID NO: 62 - DNA, 6729 bp, synthetic construct
  source 1..6729: mol_type = other DNA
gacggatcgggagatctcccgatcccctatggtgcactctcagtacaatctgctctgatgccgcatagttaagccagtatctgctccctgcttgtgtgttggaggtcgctgagtagtgcgcgagcaaaatttaagctacaacaaggcaaggcttgaccgacaattgcatgaagaatctgcttagggttaggcgttttgcgctgcttcgcgatgtacgggccagatatacgcgttgacattgattattgactagttattaatagtaatcaattacggggtcattagttcatagcccatatatggagttccgcgttacataacttacggtaaatggcccgcctggctgaccgcccaacgacccccgcccattgacgtcaataatgacgtatgttcccatagtaacgccaatagggactttccattgacgtcaatgggtggagtatttacggtaaactgcccacttggcagtacatcaagtgtatcatatgccaagtacgccccctattgacgtcaatgacggtaaatggcccgcctggcattatgcccagtacatgaccttatgggactttcctacttggcagtacatctacgtattagtcatcgctattaccatggtgatgcggttttggcagtacatcaatgggcgtggatagcggtttgactcacggggatttccaagtctccaccccattgacgtcaatgggagtttgttttggcaccaaaatcaacgggactttccaaaatgtcgtaacaactccgccccattgacgcaaatgggcggtaggcgtgtacggtgggaggtctatataagcagagctctctggctaactagagaacccactgcttactggcttatcgaaattaatacgactcactatagggagacccaagctggctagcgtttaaacttaagcttggtaccgagctcggatccgccaccatgggcaaacggacagccgacggaagcgagttcgagtcaccgaaaaagaagcgaaaagttggctccggaatgaccgacaagagcaaggagggcggcagcagcaaactgctgtactgcagcttctgcggcaagtcccagcacgaggtgcggaagctgatcgccggcccttctgtgtacatctgtgatgagtgcgtggatctgtgcaatgacatcatcagagaggagatcaaggacgtgctgcctaagaaggaatctgccgctctgcctacccctagaaagatccgggaacatctggacgactacgtgatcggccaggagcacgccaaaaaagtgctggccgtggccgtgtacaaccactacaagagactgcgcaacggcgatacaacatctgaaggcgtcgagctcggcaaaagcaacatcctgctgatcggccccaccggcagcggcaagactctgctggcagaaaccctggccagactgctggacgtgccattcacaatggccgacgccacaaccctgaccgaggccggttatgtgggcgaggacgtggaaaacatcatccaaaagctgctccagaaatgcgactacgacgtggccaaggccgaacggggcatagtttacatcgacgagatcgataagatcagccggaagtccgaaaaccccagcatcacaagagatgtgtctggagaaggcgtgcagcaggctctgctcaaactgattgagggaacagtggcttctgtgcccccccagggcggaagaaagcaccctcagcaagagttcctgcaagtggacaccagcaagatcctgttcatctgtggcggagccttcgccggcctggacaaggtcatcgagcagagggtggccaccggcaccggaatcggcttcggcgctgatgtcagaagcaaagacaacagcaagaccctgagcgagctgtttacccaggtggagcctgaggacctggtgaagtacggcctgattcctgagttcatcggcagactgccagtgaccgccacactgaccgagctggatgaagaggcactgatccagatcctgtgcgagcccaagaacgcccttacaaagcagtatgccgccctgttcgagctggagaacgtggacctggagtttagagaagatgccctgaaagctatcgccgccaaggccatgaagagaaagaccggcgccagaggcctgcggagcatcctggaagccgtgctgctggagacaatgtacgaactgcctagcatggaagaagtgtccaaggtggtgatcgacgagagcgtgattaacggcgagtctgcccctctgctgatctacagcgctaatgagagccaggccgctggagccgagtgaatctagagggcccgtttaaacccgctgatcagcctcgactgtgccttctagttgccagccatctgttgtttgcccctcccccgtgccttccttgaccctggaaggtgccactcccactgtcctttcctaataaaatgaggaaattgcatcgcattgtctgagtaggtgtcattctattctggggggtggggtggggcaggacagcaagggggaggattgggaagacaatagcaggcatgctggggatgcggtgggctctatggcttctgaggcggaaagaaccagctggggctctagggggtatccccacgcgccctgtagcggcgcattaagcgcggcgggtgtggtggttacgcgcagcgtgaccgctacacttgccagcgccctagcgcccgctcctttcgctttcttcccttcctttctcgccacgttcgccggctttccccgtcaagctctaaatcgggggctccctttagggttccgatttagtgctttacggcacctcgaccccaaaaaacttgattagggtgatggttcacgtagtgggccatcgccctgatagacggtttttcgccctttgacgttggagtccacgttctttaatagtggactcttgttccaaactggaacaacactcaaccctatctcggtctattcttttgatttataagggattttgccgatttcggcctattggttaaaaaatgagctgatttaacaaaaatttaacgcgaattaattctgtggaatgtgtgtcagttagggtgtggaaagtccccaggctccccagcaggcagaagtatgcaaagcatgcatctcaattagtcagcaaccaggtgtggaaagtccccaggctccccagcaggcagaagtatgcaaagcatgcatctcaattagtcagcaaccatagtcccgcccctaactccgcccatcccgcccctaactccgcccagttccgcccattctccgccccatggctgactaattttttttatttatgcagaggccgaggccgcctctgcctctgagctattccagaagtagtgaggaggcttttttggaggcctaggcttttgcaaaaagctcccgggagcttgtatatccattttcggatctgatcaagagacaggatgaggatcgtttcgcatgattgaacaagatggattgcacgcaggttctccggccgcttgggtggagaggctattcggctatgactgggcacaacagacaatcggctgctctgatgccgccgtgttccggctgtcagcgcaggggcgcccggttctttttgtcaagaccgacctgtccggtgccctgaatgaactgcaggacgaggcagcgcggctatcgtggctggccacgacgggcgttccttgcgcagctgtgctcgacgttgtcactgaagcgggaagggactggctgctattgggcgaagtgccggggcaggatctcctgtcatctcaccttgctcctgccgagaaagtatccatcatggctgatgcaatgcggcggctgcatacgcttgatccggctacctgcccattcgaccaccaagcgaaacatcgcatcgagcgagcacgtactcggatggaagccggtcttgtcgatcaggatgatctggacgaagagcatcaggggctcgcgccagccgaactgttcgccaggctcaaggcgcgcatgcccgacggcgaggatctcgtcgtgacccatggcgatgcctgcttgccgaatatcatggtggaaaatggccgcttttctggattcatcgactgtggccggctgggtgtggcggaccgctatcaggacatagcgttggctacccgtgatattgctgaagagcttggcggcgaatgggctgaccgcttcctcgtgctttacggtatcgccgctcccgattcgcagcgcatcgccttctatcgccttcttgacgagttcttctgagcgggactctggggttcgaaatgaccgaccaagcgacgcccaacctgccatcacgagatttcgattccaccgccgccttctatgaaaggttgggcttcggaatcgttttccgggacgccggctggatgatcctccagcgcggggatctcatgctggagttcttcgcccaccccaacttgtttattgcagcttataatggttacaaataaagcaatagcatcacaaatttcacaaataaagcatttttttcactgcattctagttgtggtttgtccaaactcatcaatgtatcttatcatgtctgtataccgtcgacctctagctagagcttggcgtaatcatggtcatagctgtttcctgtgtgaaattgttatccgctcacaattccacacaacatacgagccggaagcataaagtgtaaagcctggggtgcctaatgagtgagctaactcacattaattgcgttgcgctcactgcccgctttccagtcgggaaacctgtcgtgccagctgcattaatgaatcggccaacgcgcggggagaggcggtttgcgtattgggcgctcttccgcttcctcgctcactgactcgctgcgctcggtcgttcggctgcggcgagcggtatcagctcactcaaaggcggtaatacggttatccacagaatcaggggataacgcaggaaagaacatgtgagcaaaaggccagcaaaaggccaggaaccgtaaaaaggccgcgttgctggcgtttttccataggctccgcccccctgacgagcatcacaaaaatcgacgctcaagtcagaggtggcgaaacccgacaggactataaagataccaggcgtttccccctggaagctccctcgtgcgctctcctgttccgaccctgccgcttaccggatacctgtccgcctttctcccttcgggaagcgtggcgctttctcatagctcacgctgtaggtatctcagttcggtgtaggtcgttcgctccaagctgggctgtgtgcacgaaccccccgttcagcccgaccgctgcgccttatccggtaactatcgtcttgagtccaacccggtaagacacgacttatcgccactggcagcagccactggtaacaggattagcagagcgaggtatgtaggcggtgctacagagttcttgaagtggtggcctaactacggctacactagaagaacagtatttggtatctgcgctctgctgaagccagttaccttcggaaaaagagttggtagctcttgatccggcaaacaaaccaccgctggtagcggtttttttgtttgcaagcagcagattacgcgcagaaaaaaaggatctcaagaagatcctttgatcttttctacggggtctgacgctcagtggaacgaaaactcacgttaagggattttggtcatgagattatcaaaaaggatcttcacctagatccttttaaattaaaaatgaagttttaaatcaatctaaagtatatatgagtaaacttggtctgacagttaccaatgcttaatcagtgaggcacctatctcagcgatctgtctatttcgttcatccatagttgcctgactccccgtcgtgtagataactacgatacgggagggcttaccatctggccccagtgctgcaatgataccgcgagacccacgctcaccggctccagatttatcagcaataaaccagccagccggaagggccgagcgcagaagtggtcctgcaactttatccgcctccatccagtctattaattgttgccgggaagctagagtaagtagttcgccagttaatagtttgcgcaacgttgttgccattgctacaggcatcgtggtgtcacgctcgtcgtttggtatggcttcattcagctccggttcccaacgatcaaggcgagttacatgatcccccatgttgtgcaaaaaagcggttagctccttcggtcctccgatcgttgtcagaagtaagttggccgcagtgttatcactcatggttatggcagcactgcataattctcttactgtcatgccatccgtaagatgcttttctgtgactggtgagtactcaaccaagtcattctgagaatagtgtatgcggcgaccgagttgctcttgcccggcgtcaatacgggataataccgcgccacatagcagaactttaaaagtgctcatcattggaaaacgttcttcggggcgaaaactctcaaggatcttaccgctgttgagatccagttcgatgtaacccactcgtgcacccaactgatcttcagcatcttttactttcaccagcgtttctgggtgagcaaaaacaggaaggcaaaatgccgcaaaaaagggaataagggcgacacggaaatgttgaatactcatactcttcctttttcaatattattgaagcatttatcagggttattgtctcatgagcggatacatatttgaatgtatttagaaaaataaacaaataggggttccgcgcacatttccccgaaaagtgccacctgacgtc

SEQ ID NO: 63 - DNA, 7158 bp, synthetic construct
  source 1..7158: mol_type = other DNA
gacggatcgggagatctcccgatcccctatggtgcactctcagtacaatctgctctgatgccgcatagttaagccagtatctgctccctgcttgtgtgttggaggtcgctgagtagtgcgcgagcaaaatttaagctacaacaaggcaaggcttgaccgacaattgcatgaagaatctgcttagggttaggcgttttgcgctgcttcgcgatgtacgggccagatatacgcgttgacattgattattgactagttattaatagtaatcaattacggggtcattagttcatagcccatatatggagttccgcgttacataacttacggtaaatggcccgcctggctgaccgcccaacgacccccgcccattgacgtcaataatgacgtatgttcccatagtaacgccaatagggactttccattgacgtcaatgggtggagtatttacggtaaactgcccacttggcagtacatcaagtgtatcatatgccaagtacgccccctattgacgtcaatgacggtaaatggcccgcctggcattatgcccagtacatgaccttatgggactttcctacttggcagtacatctacgtattagtcatcgctattaccatggtgatgcggttttggcagtacatcaatgggcgtggatagcggtttgactcacggggatttccaagtctccaccccattgacgtcaatgggagtttgttttggcaccaaaatcaacgggactttccaaaatgtcgtaacaactccgccccattgacgcaaatgggcggtaggcgtgtacggtgggaggtctatataagcagagctctctggctaactagagaacccactgcttactggcttatcgaaattaatacgactcactatagggagacccaagctggctagcgtttaaacttaagcttggtaccgagctcggatccgccaccatgggcaaacggacagccgacggaagcgagttcgagtcaccgaaaaagaagcgaaaagttggctccggagcatctaaagacggcatcagcaaggacggtagcggcgacggcaacaagaagtccgcctctgagggatctagtaagaagtctggctctggaaactccggcaagggcggcaatcagctgagatgtcctaagtgcggcgatctgtgcacacacgtggagacattcgtgtcctcaacaagattcgtgaagtgcgagaaatgccaccacttcttcgtggtgctcagcgaggctgatagcaaaaagagcatcattaaggaacccgagagcgccgctgaagctgttaagctggcctttcagcaaaagcctccacctcccccaaagaagatctacaactacctggacaagtacgtggtgggccagagcttcgccaagaaggtgctgtctgtggccgtgtacaaccactacaagagaatctataacaacatccccgccaatctgagacagcaggccgaggtggagaagcagaccagcctgacccctcgggaactggagatccgcagaagggaggatgagtacagattcaccaagctgctgcagatcgccggcatcagcccgcacggcaacgctcttggagccagcatgcagcagcaagtgaaccaacagatccctcaggagaagagaggcggcgaagtgctggatagcagccacgacgacatcaagctggaaaaaagcaacatcctgctgctgggtcctacaggctccggcaaaaccctgctggcccagaccctggctaagtgtctggacgtgcctttcgccatctgcgactgcaccaccctgacacaggccggatatgtaggagaggacatcgagagcgtgattgccaagctcctgcaggacgccaactacaacgtggagaaggcccagcaaggcattgtctttctggacgaagtggacaagatcggcagcgtccctggaatccaccagctgcgggacgtgggcggcgagggcgtgcagcagggcctgcttaagctgctagaaggcacaatcgtgaatgttccagagaagaatagcagaaagctgcggggcgagacagtgcaagtggacaccaccaacatcctgttcgtggccagcggcgccttcaacggcctggaccggatcatcagcagacggaaaaacgagaagtacctgggctttggcacccctagcaacctgggcaagggcagacgtgccgctgctgctgccgacctggccaaccggagcggagaaagcaatacccaccaggacatcgaggagaaggatagactgctgagacacgtggaagcccgggacctgatcgagttcggcatgatccctgagtttgtgggccgcctgcctgtggtggtgcccctgcactctctggatgaaaagaccctggtgcagatcctgaccgagcctagaaacgctgtgatcccccagtaccaggccctgttcagcatggacaagtgtgaactgaacgtgactgaggatgccctgaaggccatcgccagacttgctttggagagaaaaaccggagcccgggggctgcggtccatcatggaaaagctgctgctggaacccatgttcgaggtgccaaacagcgacatcgtgtgcgtggaagtggacaaagaagtggtcgagggaaaaaaagagcccggctacatccgggcccctaccaaagaaagcagcgaggaagagtacgatagcggcgtcgaagaggaaggatggcctagacaggccgacgccgccaattcttgaatctagagggcccgtttaaacccgctgatcagcctcgactgtgccttctagttgccagccatctgttgtttgcccctcccccgtgccttccttgaccctggaaggtgccactcccactgtcctttcctaataaaatgaggaaattgcatcgcattgtctgagtaggtgtcattctattctggggggtggggtggggcaggacagcaagggggaggattgggaagacaatagcaggcatgctggggatgcggtgggctctatggcttctgaggcggaaagaaccagctggggctctagggggtatccccacgcgccctgtagcggcgcattaagcgcggcgggtgtggtggttacgcgcagcgtgaccgctacacttgccagcgccctagcgcccgctcctttcgctttcttcccttcctttctcgccacgttcgccggctttccccgtcaagctctaaatcgggggctccctttagggttccgatttagtgctttacggcacctcgaccccaaaaaacttgattagggtgatggttcacgtagtgggccatcgccctgatagacggtttttcgccctttgacgttggagtccacgttctttaatagtggactcttgttccaaactggaacaacactcaaccctatctcggtctattcttttgatttataagggattttgccgatttcggcctattggttaaaaaatgagctgatttaacaaaaatttaacgcgaattaattctgtggaatgtgtgtcagttagggtgtggaaagtccccaggctccccagcaggcagaagtatgcaaagcatgcatctcaattagtcagcaaccaggtgtggaaagtccccaggctccccagcaggcagaagtatgcaaagcatgcatctcaattagtcagcaaccatagtcccgcccctaactccgcccatcccgcccctaactccgcccagttccgcccattctccgccccatggctgactaattttttttatttatgcagaggccgaggccgcctctgcctctgagctattccagaagtagtgaggaggcttttttggaggcctaggcttttgcaaaaagctcccgggagcttgtatatccattttcggatctgatcaagagacaggatgaggatcgtttcgcatgattgaacaagatggattgcacgcaggttctccggccgcttgggtggagaggctattcggctatgactgggcacaacagacaatcggctgctctgatgccgccgtgttccggctgtcagcgcaggggcgcccggttctttttgtcaagaccgacctgtccggtgccctgaatgaactgcaggacgaggcagcgcggctatcgtggctggccacgacgggcgttccttgcgcagctgtgctcgacgttgtcactgaagcgggaagggactggctgctattgggcgaagtgccggggcaggatctcctgtcatctcaccttgctcctgccgagaaagtatccatcatggctgatgcaatgcggcggctgcatacgcttgatccggctacctgcccattcgaccaccaagcgaaacatcgcatcgagcgagcacgtactcggatggaagccggtcttgtcgatcaggatgatctggacgaagagcatcaggggctcgcgccagccgaactgttcgccaggctcaaggcgcgcatgcccgacggcgaggatctcgtcgtgacccatggcgatgcctgcttgccgaatatcatggtggaaaatggccgcttttctggattcatcgactgtggccggctgggtgtggcggaccgctatcaggacatagcgttggctacccgtgatattgctgaagagcttggcggcgaatgggctgaccgcttcctcgtgctttacggtatcgccgctcccgattcgcagcgcatcgccttctatcgccttcttgacgagttcttctgagcgggactctggggttcgaaatgaccgaccaagcgacgcccaacctgccatcacgagatttcgattccaccgccgccttctatgaaaggttgggcttcggaatcgttttccgggacgccggctggatgatcctccagcgcggggatctcatgctggagttcttcgcccaccccaacttgtttattgcagcttataatggttacaaataaagcaatagcatcacaaatttcacaaataaagcatttttttcactgcattctagttgtggtttgtccaaactcatcaatgtatcttatcatgtctgtataccgtcgacctctagctagagcttggcgtaatcatggtcatagctgtttcctgtgtgaaattgttatccgctcacaattccacacaacatacgagccggaagcataaagtgtaaagcctggggtgcctaatgagtgagctaactcacattaattgcgttgcgctcactgcccgctttccagtcgggaaacctgtcgtgccagctgcattaatgaatcggccaacgcgcggggagaggcggtttgcgtattgggcgctcttccgcttcctcgctcactgactcgctgcgctcggtcgttcggctgcggcgagcggtatcagctcactcaaaggcggtaatacggttatccacagaatcaggggataacgcaggaaagaacatgtgagcaaaaggccagcaaaaggccaggaaccgtaaaaaggccgcgttgctggcgtttttccataggctccgcccccctgacgagcatcacaaaaatcgacgctcaagtcagaggtggcgaaacccgacaggactataaagataccaggcgtttccccctggaagctccctcgtgcgctctcctgttccgaccctgccgcttaccggatacctgtccgcctttctcccttcgggaagcgtggcgctttctcatagctcacgctgtaggtatctcagttcggtgtaggtcgttcgctccaagctgggctgtgtgcacgaaccccccgttcagcccgaccgctgcgccttatccggtaactatcgtcttgagtccaacccggtaagacacgacttatcgccactggcagcagccactggtaacaggattagcagagcgaggtatgtaggcggtgctacagagttcttgaagtggtggcctaactacggctacactagaagaacagtatttggtatctgcgctctgctgaagccagttaccttcggaaaaagagttggtagctcttgatccggcaaacaaaccaccgctggtagcggtttttttgtttgcaagcagcagattacgcgcagaaaaaaaggatctcaagaagatcctttgatcttttctacggggtctgacgctcagtggaacgaaaactcacgttaagggattttggtcatgagattatcaaaaaggatcttcacctagatccttttaaattaaaaatgaagttttaaatcaatctaaagtatatatgagtaaacttggtctgacagttaccaatgcttaatcagtgaggcacctatctcagcgatctgtctatttcgttcatccatagttgcctgactccccgtcgtgtagataactacgatacgggagggcttaccatctggccccagtgctgcaatgataccgcgagacccacgctcaccggctccagatttatcagcaataaaccagccagccggaagggccgagcgcagaagtggtcctgcaactttatccgcctccatccagtctattaattgttgccgggaagctagagtaagtagttcgccagttaatagtttgcgcaacgttgttgccattgctacaggcatcgtggtgtcacgctcgtcgtttggtatggcttcattcagctccggttcccaacgatcaaggcgagttacatgatcccccatgttgtgcaaaaaagcggttagctccttcggtcctccgatcgttgtcagaagtaagttggccgcagtgttatcactcatggttatggcagcactgcataattctcttactgtcatgccatccgtaagatgcttttctgtgactggtgagtactcaaccaagtcattctgagaatagtgtatgcggcgaccgagttgctcttgcccggcgtcaatacgggataataccgcgccacatagcagaactttaaaagtgctcatcattggaaaacgttcttcggggcgaaaactctcaaggatcttaccgctgttgagatccagttcgatgtaacccactcgtgcacccaactgatcttcagcatcttttactttcaccagcgtttctgggtgagcaaaaacaggaaggcaaaatgccgcaaaaaagggaataagggcgacacggaaatgttgaatactcatactcttcctttttcaatattattgaagcatttatcagggttattgtctcatgagcggatacatatttgaatgtatttagaaaaataaacaaataggggttccgcgcacatttccccgaaaagtgccacctgacgtc

SEQ ID NO: 64 - DNA, 4869 bp, synthetic construct
  source 1..4869: mol_type = other DNA
ggaaacctgtcgtgccagctgcattaatgaatcggccaacgcgcggggagaggcggtttgcgtattgggcgctcttccgcttcctcgctcactgactcgctgcgctcggtcgttcggctgcggcgagcggtatcagctcactcaaaggcggtaatacggttatccacagaatcaggggataacgcaggaaagaacatgtgagcaaaaggccagcaaaaggccaggaaccgtaaaaaggccgcgttgctggcgtttttccataggctccgcccccctgacgagcatcacaaaaatcgacgctcaagtcagaggtggcgaaacccgacaggactataaagataccaggcgtttccccctggaagctccctcgtgcgctctcctgttccgaccctgccgcttaccggatacctgtccgcctttctcccttcgggaagcgtggcgctttctcatagctcacgctgtaggtatctcagttcggtgtaggtcgttcgctccaagctgggctgtgtgcacgaaccccccgttcagcccgaccgctgcgccttatccggtaactatcgtcttgagtccaacccggtaagacacgacttatcgccactggcagcagccactggtaacaggattagcagagcgaggtatgtaggcggtgctacagagttcttgaagtggtggcctaactacggctacactagaagaacagtatttggtatctgcgctctgctgaagccagttaccttcggaaaaagagttggtagctcttgatccggcaaacaaaccaccgctggtagcggtggtttttttgtttgcaagcagcagattacgcgcagaaaaaaaggatctcaagaagatcctttgatcttttctacggggtctgacgctcagtggaacgaaaactcacgttaagggattttggtcatgagattatcaaaaaggatcttcacctagatccttttaaattaaaaatgaagttttagcacgtgtcagtcctgctcctcggccacgaagtgcacgcagttgccggccgggtcgcgcagggcgaactcccgcccccacggctgctcgccgatctcggtcatggccggcccggaggcgtcccggaagttcgtggacacgacctccgaccactcggcgtacagctcgtccaggccgcgcacccacacccaggccagggtgttgtccggcaccacctggtcctggaccgcgctgatgaacagggtcacgtcgtcccggaccacaccggcgaagtcgtcctccacgaagtcccgggagaacccgagccggtcggtccagaactcgaccgctccggcgacgtcgcgcgcggtgagcaccggaacggcactggtcaacttggccatggtggccctcctcacgtgctattattgaagcatttatcagggttattgtctcatgagcggatacatatttgaatgtatttagaaaaataaacaaataggggttccgcgcacatttccccgaaaagtgccacctgatgcggtgtgaaataccgcacagatgcgtaaggagaaaataccgcatcaggaaattgtaagcgttaataattcagaagaactcgtcaagaaggcgatagaaggcgatgcgctgcgaatcgggagcggcgataccgtaaagcacgaggaagcggtcagcccattcgccgccaagctcttcagcaatatcacgggtagccaacgctatgtcctgatagcggtccgccacacccagccggccacagtcgatgaatccagaaaagcggccattttccaccatgatattcggcaagcaggcatcgccatgggtcacgacgagatcctcgccgtcgggcatgctcgccttgagcctggcgaacagttcggctggcgcgagcccctgatgctcttcgtccagatcatcctgatcgacaagaccggcttccatccgagtacgtgctcgctcgatgcgatgtttcgcttggtggtcgaatgggcaggtagccggatcaagcgtatgcagccgccgcattgcatcagccatgatggatactttctcggcaggagcaaggtgagatgacaggagatcctgccccggcacttcgcccaatagcagccagtcccttcccgcttcagtgacaacgtcgagcacagctgcgcaaggaacgcccgtcgtggccagccacgatagccgcgctgcctcgtcttgcagttcattcagggcaccggacaggtcggtcttgacaaaaagaaccgggcgcccctgcgctgacagccggaacacggcggcatcagagcagccgattgtctgttgtgcccagtcatagccgaatagcctctccacccaagcggccggagaacctgcgtgcaatccatcttgttcaatcatgcgaaacgatcctcatcctgtctcttgatcagagcttgatcccctgcgccatcagatccttggcggcaagaaagccatccagtttactttgcagggcttcccaaccttaccagagggcgccccagctggcaattccggttcgcttgctgtccataaaaccgcccagtctagctatcgccatgtaagcccactgcaagctacctgctttctctttgcgcttgcgttttcccttgtccagatagcccagtagctgacattcatccggggtcagcaccgtttctgcggactggctttctacgtgaaaaggatctaggtgaagatcctttttgataatctcatgcctgacatttatattccccagaacatcaggttaatggcgtttttgatgtcattttcgcggtggctgagatcagccacttcttccccgataacggagaccggcacactggccatatcggtggtcatcatgcgccagctttcatccccgatatgcaccaccgggtaaagttcacgggagactttatctgacagcagacgtgcactggccagggggatcaccatccgtcgccccggcgtgtcaataatatcactctgtacatccacaaacagacgataacggctctctcttttataggtgtaaaccttaaactgccgtacgtataggctgcgcaactgttgggaagggcgatcggtgcgggcctcttcgctattacgccagctggcgaaagggggatgtgctgcaaggcgattaagttgggtaacgccagggttttcccagtcacgacgttgtaaaacgacggccagtgaattgtaatacgactcactatagggcgaattgggccctctagatgcatgctcgagcggccgccagtgtgatggatatctgcagaattcgcccttgcgacgtagggataacagggtaatcctcagggagacgcacaatcaaccttagtctgacgtctcaggcctaggcaaagaagaacacaacttcttaaggtcccctccaccccacagtggggcgaggtaggcgtgtacggtgggaggcctatataagcagagctcgtttagtgaaccgtcagatcgcctggagaattcgccaccatggactacaaggatgacgacgataaaacttccggtggcggactgggttccaccgcgagcaagggcgaggaggataacatggccatcatcaaggagttcatgcgcttcaaggtgcacatggagggctccgtgaacggccacgagttcgagatcgagggcgagggcgagggccgcccctacgagggcacccagaccgccaagctgaaggtgaccaagggcggccccctgcccttcgcctgggacatcctgtcccctcagttcatgtacggctccaaggcctacgtgaagcaccccgccgacatccccgactacttgaagctgtccttccccgagggcttcaagtgggagcgcgtgatgaacttcgaggacggcggcgtggtgaccgtgacccaggactcctccctacaggacggcgagttcatctacaaggtgaagctgcgcggcaccaacttcccctccgacggccccgtaatgcagaagaagacgatgggctgggaggcctcctccgagcggatgtaccccgaggacggcgccctgaagggcgagatcaagcagaggctgaagctgaaggacggcggccactacgacgccgaggtcaagaccacctacaaggccaagaagcccgtgcagctgcccggcgcctacaacgtcaacatcaagttggacatcacctcccacaacgaggactacaccatcgtggaacagtacgagcgcgccgagggccgccactccaccggcggcatggacgagctgtacaaggcccgcggttaagatgcatgccagttctaggaattcgagctcggtacccggggatcctctagtcagctgacgcgtgctagcgcggccgcatcgataagcttgtcgacgatatctctagaggatcataatcagccataccacatttgtagaggttttacttgctttaaaaaacctcccacacctccccctgaacctgaaacataaaatgaatgcaattgttgttgttaacttgtttattgcagcttataatggttacaaataaagcaatagcatcacaaatttcacaaataaagcatttttttcactgcctcgagcttcctcgctcactgactcgctgcgctcggtcgttcggctgcggcgagcggtatcagctcactcaaaggcggtaataaagggcgaattccagcacactggcggccgttactagtggatccgagctcggtaccaagcttgatgcatagcttgagtattctatagtgtcacctaaatagcttggcgtaatcatggtcatagctgtttcctgtgtgaaattgttatccgctcacaattccacacaacatacgagccggaagcataaagtgtaaagcctggggtgcctaatgagtgagctaactcacattaattgcgttgcgctcactgcccgctttccagtcg

SEQ ID NO: 65 - DNA, 2860 bp, synthetic construct
  source 1..2860: mol_type = other DNA
ctgtcagaccaagtttactcatatatactttagattgatttaaaacttcatttttaatttaaaaggatctaggtgaagatcctttttgataatctcatgaccaaaatcccttaacgtgagttttcgttccactgagcgtcagaccccgtagaaaagatcaaaggatcttcttgagatcctttttttctgcgcgtaatctgctgcttgcaaacaaaaaaaccaccgctaccagcggtggtttgtttgccggatcaagagctaccaactctttttccgaaggtaactggcttcagcagagcgcagataccaaatactgttcttctagtgtagccgtagttaggccaccacttcaagaactctgtagcaccgcctacatacctcgctctgctaatcctgttaccagtggctgctgccagtggcgataagtcgtgtcttaccgggttggactcaagacgatagttaccggataaggcgcagcggtcgggctgaacggggggttcgtgcacacagcccagcttggagcgaacgacctacaccgaactgagatacctacagcgtgagctatgagaaagcgccacgcttcccgaagggagaaaggcggacaggtatccggtaagcggcagggtcggaacaggagagcgcacgagggagcttccagggggaaacgcctggtatctttatagtcctgtcgggtttcgccacctctgacttgagcgtcgatttttgtgatgctcgtcaggggggcggagcctatggaaaaacgccagcaacgcggcctttttacggttcctggccttttgctggccttttgctcacatgttctttcctgcgttatcccctgattctgtggataaccgtattaccgcctttgagtgagctgataccaccggtcaagctttgttgatacaaccataaaatgataattacacccataaattgataattatcacacccaaggaggtaaataatggagaaaaaaatcactggatataccaccgttgatatatcccaatggcatcgtaaagaacattttgaggcatttcagtcagttgctcaatgtacctataaccagaccgttcagctggatattacggcctttttaaagaccgtaaagaaaaataagcacaagttttatccggcctttattcacattcttgcccgcctgatgaatgctcatccggagttccgtatggcaatgaaagacggtgagctggtgatatgggatagtgttcacccttgttacaccgttttccatgagcaaactgaaacgttttcatcgctctggagtgaataccacgacgatttccggcagtttctacacatatattcgcaagatgtggcgtgttacggtgaaaacctggcctatttccctaaagggtttattgagaatatgtttttcgtctcagccaatccctgggtgagtttcaccagttttgatttaaacgtggccaatatggacaacttcttcgcccccgttttcactatgggcaaatattatacgcaaggcgacaaggtgctgatgccgctggcgattcaggttcatcatgccgtttgtgatggcttccatgtcggcagaatgcttaatgaattacaacagtactgcgatgagtggcagggcggggcgtaatttttttaaggcagttattggtgcccttctagagtccttactgcagtagttttgctgaaatactcgattcacaaaaatatcaacttatggttgttttgtgagatatcaatatatggttgttttgtggttaagttgctgattataaataattattaaatatcactttatggttgcatcaacaggtacccctaggtccaagctcgttccgttattaggattaagctggaagagccttagacgtcaggtggcacttttcggggaaatgtgcgcggaacccctatttgtttatttttctaaatacattcaaatatgtatccgctcatgagacaataaccctgataaatgcttcaataatattgaaaaaggaagagtatgagtattcaacatttccgtgtcgcccttattcccttttttgcggcattttgccttcctgtttttgctcacccagaaacgctggtgaaagtaaaagatgctgaagatcagttgggtgcacgagtgggttacatcgaactggatctcaacagcggtaagatccttgagagttttcgccccgaagaacgttttccaatgatgagcacttttaaagttctgctatgtggcgcggtattatcccgtattgacgccgggcaagagcaactcggtcgccgcatacactattctcagaatgacttggttgagtactcaccagtcacagaaaagcatcttacggatggcatgacagtaagagaattatgcagtgctgccataaccatgagtgataacactgcggccaacttacttctgacaacgatcggaggaccgaaggagctaaccgcttttttgcacaacatgggggatcatgtaactcgccttgatcgttgggaaccggagctgaatgaagccataccaaacgacgagcgtgacaccacgatgcctgtagcaatggcaacaacgttgcgcaaactattaactggcgaactacttactctagcttcccggcaacaattaatagactggatggaggcggataaagttgcaggaccacttctgcgctcggcccttccggctggctggtttattgctgataaatctggagccggtgagcgtgggtctcgcggtatcattgcagcactggggccagatggtaagccctcccgtatcgtagttatctacacgacggggagtcaggcaactatggatgaacgaaatagacagatcgctgagataggtgcctcactgattaagcattggtaa

SEQ ID NO: 66 - DNA, 8445 bp, synthetic construct
  source 1..8445: mol_type = other DNA
attcaccaccctgaattgactctcttccgggcgctatcatgccataccgcgaaaggttttgcgccattcgatggtgtccgggatctcgacgctctcccttatgcgactcctgcattaggaaattaatacgactcactataggggaattgtgagcggataacaattcccctgtagaaataattttgtttaactttaataaggagatataccatgggtgaactgccgagtaggtagctgataacagtacagcgcggctgaaatcatcattaaagcggtgaactgccgagtaggtagctgataacggatccgaattcgagctcggcgcgcctgcaggtcgacaagcttgcggccgcataatgcttaagtcgaacagaaagtaatcgtattgtacacggccgcataatcgaaattaatacgactcactataggggaattgtgagcggataacaattccccatcttagtatattagttaagtataagaaggagatatacatatgtttttgcaaagacctaaaccttacagcgatgaaagtttagaaagtttctttatccgagtggctaacaaaaatggctacggtgatgtccatcgcttcctagaagccactaaacgattccttcaagacattgaccataatggctatcaaacctttccgactgatataactcggataaacccatactcagctaaaaacagttccagcgcacgaactgcgtcattcctgaaacttgcacaattgacatttaatgaaccgccagagctacttgggttggcaattaacagaacaaacatgaaatactcgccgtcaactagcgcggttgttagaggtgcagaagtctttcctcgcagtttactacggacgcactccatcccctgctgtcctttgtgtctgcgagaaaatggctacgcctcctacctttggcactttcaggggtacgaatactgccacagccataacgtacctttaattaccacttgtagctgtggtaaggagtttgactaccgagtatctgggttaaagggcatttgctgcaaatgcaaggagcctatcaccttaaccagcagggagaacggtcatgaggcagcgtgtactgtttcaaactggcttgctggccatgaatctaaacctctgccaaatcttcctaaaagctaccgatggggtttagttcattggtggatgggtattaaagatagcgagttcgatcacttttcgttcgttcaatttttctcaaactggccaaggtcattccactcgataatcgaagatgaagtagagttcaaccttgagcatgctgttgtcagcacgtctgaattacgactaaaagatcttcttggtcgattgtttttcggttcaattcggttacctgagcggaatcttcaacacaatatcatccttggtgagcttctctgctatttagaaaatcgtttatggcaagacaagggattaatcgccaacctcaaaatgaacgcgttagaggcgactgtaatgttaaattgtagcctcgatcagattgcatcaatggttgaacaacgcatcttgaagccaaatcgaaaaagcaagcccaacagccctcttgatgttaccgattatctatttcatttcggcgatattttctgtctttggttagctgagttccaaagcgatgagtttaaccgttcgttttatgtgtcgaggtggtaaatgcaaactctgaaagaactaatcgcatccaatcctgacgacttaacaactgaacttaagagagcatttcgtccactcacaccgcatattgcaattgatggtaatgaacttgacgcactgacgatattagtcaatttaaccgataagactgatgatcagaaagacctgctcgatcgagccaaatgcaagcaaaaacttcgagatgaaaaatggtgggctagctgcataaattgcgttaattacagacaaagccataacccaaaattcccggatatacgttctgaaggcgtgattcgaacccaagccctgggtgaattaccgagtttcctactctcgtcctcaaaaatcccaccataccattggtcatatagccatgattcaaaatacgtcaacaaaagcgcattcctcaccaatgagttttgttgggatggtgagatctcatgtttgggtgagcttcttaaagatgcagatcacccactttggaatactttgaaaaagttaggttgttctcaaaaaacttgcaaagcaatggcaaaacaactagctgatattactctcacgactatcaatgtcacactcgcaccaaattacctgactcaaatatctctccccgatagtgatacatcctacatttcactctctcctgttgcatcgctatcgatgcaaagccactttcatcagaggctccaagatgaaaatcggcatagcgcgataacgcggtttagccgaactaccaacatgggggtcactgcgatgacatgtggcggcgcatttagaatgttaaagtctggcgctaagttttccagcccccctcatcaccgattaaacagtaaacgaagttggttgacgtcagagcatgttcagtcattaaaacagtaccagcgcctcaacaaaagcctcatacctgaaaactctcggattgcactccgtagaaaatacaaaatcgagcttcaaaatatggtcagatcttggtttgcaatgcaagaccatacccttgattcgaacatacttatccaacatttgaatcatgacctatcttacttaggagccacaaaacgttttgcatacgatccagcgatgaccaagctctttactgagcttttgaaacgagagttatcaaattcaatcaataatggtgagcaacacactaatggatcgtttttagtcctaccgaatatcagggtttgtggcgcaacagctttaagctccccggtaacggtggggattccatcacttacagctttctttggcttcgttcacgcatttgaacggaatataaatcgcaccacctcatcgtttcgtgttgaatcctttgcgatatgcgtccatcaactacatgtcgagaagcgaggtttgacagcagagtttgtggaaaaaggcgacgggactatatccgctcccgcgacccgggatgactggcagtgtgatgtcgtatttagccttattttgaacaccaactttgctcaacatattgaccaagatacgttagttacatcactaccaaagcgattggctcggggttcagcaaaaattgcgattgatgactttaaacatatcaactcattctcgacattagaaacagcgatcgaatctctgccaatagaagctggtaggtggttatcactttacgcacagtcaaacaataatctaagtgatctattagcagccatgacagaggaccatcagctcatggcaagctgcgtcggttaccacttgttagaagagcccaaagataaaccaaactccctcagaggttacaaacacgctatcgccgagtgcatcattggactcattaactcaatcacctttagctcagagactgatcccaacacaatcttttggtcgctaaagaactatcaaaactacctagtggtacagccaaggagtatcaacgatgaaactaccgacaaatctagcctatgagcgctctatcgacccatcagatgtctgtttttttgtcgtctggcccgatgatagaaaaacacctttaacctacaattctcgtactctgctcgggcaaatggaagcggcatcattagcctatgatgtctcaggtcaaccaataaaaagtgccaccgctgaggcgttagctcaagggaaccctcatcaagttgatttctgccacgttccatacggtgcgagtcatattgaatgcagtttctccgtctcgttttcttctgaactacgtcaaccatataagtgtaactcaagcaaagttaaacaaacgctagtgcaattagtcgagctctacgaaacgaaaatcggctggactgagctagcaacccgatatttgatgaacatttgcaacggtaaatggctgtggaaaaatacccgtaaagcctattgctggaacattgtacttacaccttggccttggaacggggaaaaggttggatttgaagatattcgtactaactacacctcacggcaagactttaaaaataataaaaattggtctgctatagttgaaatgatcaaaaccgcattttctagtactgatgggctggcgatatttgaagtcagggccaccttgcacttgccaacgaatgctatggtgcggccaagccaagttttcacagaaaaagaaagtggcagtaaaagtaaatctaaaactcaaaacagtcgagtttttcagagtacaactattgatggtgaacgatcgccaatactaggggcctttaaaacgggagcagctattgcaaccattgacgactggtatcctgaagccactgagccactaagggtcggacggtttggggttcatcgcgaagatgtcacttgctaccgtcatccgtctaccggaaaagattttttctcgatattacaacaagcagagcactatattgaagtgttgagcgccaacaaaactcccgctcaagaaactatcaacgacatgcactttttaatggctaacctgattaagggtgggatgttccagcataaaggagactgactgtgaaatggtattataagacaatcacctttctgccagagttgtgcaacaacgagtcactggctgcaaagtgtctccgcgttctgcatggatttaactatcagtatgagacacgaaatatcggcgtttcatttccgctttggtgtgatgcaacggttggaaaaaagatttcatttgtcagcaagaacaagatagaactcgacttactacttaaacaacactatttcgtccaaatggaacaacttcaatactttcatatatccaacactgttctcgtcccagaagattgtacatacgtttcctttagacgctgtcaatctatagataagctcacagcagcagggctggcaaggaaaatcagacgcctggagaaacgtgctctatctagaggcgagcaatttgacccatcatcttttgctcaaaaagagcatactgcaatagcgcactaccactcacttggggagtccagcaaacagacgaaccgcaactttcgactcaatatcaggatgctctcggagcaaccccgtgaggggaactcgatttttagtagctatggcttatcaaattcagaaaactcgtttcagcctgtacccttaatctgacctaggctgctgccaccgctgagcaataactagcataaccccttggggcctctaaacgggtcttgaggggttttttgctgaaacctcaggcatttgagaagcacacggtcacactgcttccggtagtcaataaaccggtaaaccagcaatagacataagcggctatttaacgaccctgccctgaaccgacgaccgggtcatcgtggccggatcttgcggcccctcggcttgaacgaattgttagacattatttgccgactaccttggtgatctcgcctttcacgtagtggacaaattcttccaactgatctgcgcgcgaggccaagcgatcttcttcttgtccaagataagcctgtctagcttcaagtatgacgggctgatactgggccggcaggcgctccattgcccagtcggcagcgacatccttcggcgcgattttgccggttactgcgctgtaccaaatgcgggacaacgtaagcactacatttcgctcatcgccagcccagtcgggcggcgagttccatagcgttaaggtttcatttagcgcctcaaatagatcctgttcaggaaccggatcaaagagttcctccgccgctggacctaccaaggcaacgctatgttctcttgcttttgtcagcaagatagccagatcaatgtcgatcgtggctggctcgaagatacctgcaagaatgtcattgcgctgccattctccaaattgcagttcgcgcttagctggataacgccacggaatgatgtcgtcgtgcacaacaatggtgacttctacagcgcggagaatctcgctctctccaggggaagccgaagtttccaaaaggtcgttgatcaaagctcgccgcgttgtttcatcaagccttacggtcaccgtaaccagcaaatcaatatcactgtgtggcttcaggccgccatccactgcggagccgtacaaatgtacggccagcaacgtcggttcgagatggcgctcgatgacgccaactacctctgatagttgagtcgatacttcggcgatcaccgcttccctcatactcttcctttttcaatattattgaagcatttatcagggttattgtctcatgagcggatacatatttgaatgtatttagaaaaataaacaaatagctagctcactcggtcgctacgctccgggcgtgagactgcggcgggcgctgcggacacatacaaagttacccacagattccgtggataagcaggggactaacatgtgaggcaaaacagcagggccgcgccggtggcgtttttccataggctccgccctcctgccagagttcacataaacagacgcttttccggtgcatctgtgggagccgtgaggctcaaccatgaatctgacagtacgggcgaaacccgacaggacttaaagatccccaccgtttccggcgggtcgctccctcttgcgctctcctgttccgaccctgccgtttaccggatacctgttccgcctttctcccttacgggaagtgtggcgctttctcatagctcacacactggtatctcggctcggtgtaggtcgttcgctccaagctgggctgtaagcaagaactccccgttcagcccgactgctgcgccttatccggtaactgttcacttgagtccaacccggaaaagcacggtaaaacgccactggcagcagccattggtaactgggagttcgcagaggatttgtttagctaaacacgcggttgctcttgaagtgtgcgccaaagtccggctacactggaaggacagatttggttgctgtgctctgcgaaagccagttaccacggttaagcagttccccaactgacttaaccttcgatcaaaccacctccccaggtggttttttcgtttacagggcaaaagattacgcgcagaaaaaaaggatctcaagaagatcctttgatcttttctactgaaccgctctagatttcagtgcaatttatctcttcaaatgtagcacctgaagtcagccccatacgatataagttgtaattctcatgttagtcatgccccgcgcccaccggaaggagctgactgggttgaaggctctcaagggcatcggtcgagatcccggtgcctaatgagtgagctaacttacattaattgcgttgcgctcactgcccgctttccagtcgggaaacctgtcgtgccagctgcattaatgaatcggccaacgcgcggggagaggcggtttgcgtattgggcgccagggtggtttttcttttcaccagtgagacgggcaacagctgattgcccttcaccgcctggccctgagagagttgcagcaagcggtccacgctggtttgccccagcaggcgaaaatcctgtttgatggtggttaacggcgggatataacatgagctgtcttcggtatcgtcgtatcccactaccgagatgtccgcaccaacgcgcagcccggactcggtaatggcgcgcattgcgcccagcgccatctgatcgttggcaaccagcatcgcagtgggaacgatgccctcattcagcatttgcatggtttgttgaaaaccggacatggcactccagtcgccttcccgttccgctatcggctgaatttgattgcgagtgagatatttatgccagccagccagacgcagacgcgccgagacagaacttaatgggcccgctaacagcgcgatttgctggtgacccaatgcgaccagatgctccacgcccagtcgcgtaccgtcttcatgggagaaaataatactgttgatgggtgtctggtcagagacatcaagaaataacgccggaacattagtgcaggcagcttccacagcaatggcatcctggtcatccagcggatagttaatgatcagcccactgacgcgttgcgcgagaagattgtgcaccgccgctttacaggcttcgacgccgcttcgttctaccatcgacaccaccacgctggcacccagttgatcggcgcgagatttaatcgccgcgacaatttgcgacggcgcgtgcagggccagactggaggtggcaacgccaatcagcaacgactgtttgcccgccagttgttgtgccacgcggttgggaatgtaattcagctccgccatcgccgcttccactttttcccgcgttttcgcagaaacgtggctggcctggttcaccacgcgggaaacggtctgataagagacaccggcatactctgcgacatcgtataacgttactggtttcac

SEQ ID NO: 67 - DNA, 8445 bp, synthetic construct
  source 1..8445: mol_type = other DNA
attcaccaccctgaattgactctcttccgggcgctatcatgccataccgcgaaaggttttgcgccattcgatggtgtccgggatctcgacgctctcccttatgcgactcctgcattaggaaattaatacgactcactataggggaattgtgagcggataacaattcccctgtagaaataattttgtttaactttaataaggagatataccatgggtgaactgccgagtaggtagctgataacgagacctctgtcttgtcagctagggtggtctcgtgaactgccgagtaggtagctgataacggatccgaattcgagctcggcgcgcctgcaggtcgacaagcttgcggccgcataatgcttaagtcgaacagaaagtaatcgtattgtacacggccgcataatcgaaattaatacgactcactataggggaattgtgagcggataacaattccccatcttagtatattagttaagtataagaaggagatatacatatgtttttgcaaagacctaaaccttacagcgatgaaagtttagaaagtttctttatccgagtggctaacaaaaatggctacggtgatgtccatcgcttcctagaagccactaaacgattccttcaagacattgaccataatggctatcaaacctttccgactgatataactcggataaacccatactcagctaaaaacagttccagcgcacgaactgcgtcattcctgaaacttgcacaattgacatttaatgaaccgccagagctacttgggttggcaattaacagaacaaacatgaaatactcgccgtcaactagcgcggttgttagaggtgcagaagtctttcctcgcagtttactacggacgcactccatcccctgctgtcctttgtgtctgcgagaaaatggctacgcctcctacctttggcactttcaggggtacgaatactgccacagccataacgtacctttaattaccacttgtagctgtggtaaggagtttgactaccgagtatctgggttaaagggcatttgctgcaaatgcaaggagcctatcaccttaaccagcagggagaacggtcatgaggcagcgtgtactgtttcaaactggcttgctggccatgaatctaaacctctgccaaatcttcctaaaagctaccgatggggtttagttcattggtggatgggtattaaagatagcgagttcgatcacttttcgttcgttcaatttttctcaaactggccaaggtcattccactcgataatcgaagatgaagtagagttcaaccttgagcatgctgttgtcagcacgtctgaattacgactaaaagatcttcttggtcgattgtttttcggttcaattcggttacctgagcggaatcttcaacacaatatcatccttggtgagcttctctgctatttagaaaatcgtttatggcaagacaagggattaatcgccaacctcaaaatgaacgcgttagaggcgactgtaatgttaaattgtagcctcgatcagattgcatcaatggttgaacaacgcatcttgaagccaaatcgaaaaagcaagcccaacagccctcttgatgttaccgattatctatttcatttcggcgatattttctgtctttggttagctgagttccaaagcgatgagtttaaccgttcgttttatgtgtcgaggtggtaaatgcaaactctgaaagaactaatcgcatccaatcctgacgacttaacaactgaacttaagagagcatttcgtccactcacaccgcatattgcaattgatggtaatgaacttgacgcactgacgatattagtcaatttaaccgataagactgatgatcagaaagacctgctcgatcgagccaaatgcaagcaaaaacttcgagatgaaaaatggtgggctagctgcataaattgcgttaattacagacaaagccataacccaaaattcccggatatacgttctgaaggcgtgattcgaacccaagccctgggtgaattaccgagtttcctactctcgtcctcaaaaatcccaccataccattggtcatatagccatgattcaaaatacgtcaacaaaagcgcattcctcaccaatgagttttgttgggatggtgagatctcatgtttgggtgagcttcttaaagatgcagatcacccactttggaatactttgaaaaagttaggttgttctcaaaaaacttgcaaagcaatggcaaaacaactagctgatattactctcacgactatcaatgtcacactcgcaccaaattacctgactcaaatatctctccccgatagtgatacatcctacatttcactctctcctgttgcatcgctatcgatgcaaagccactttcatcagaggctccaagatgaaaatcggcatagcgcgataacgcggtttagccgaactaccaacatgggggtcactgcgatgacatgtggcggcgcatttagaatgttaaagtctggcgctaagttttccagcccccctcatcaccgattaaacagtaaacgaagttggttgacgtcagagcatgttcagtcattaaaacagtaccagcgcctcaacaaaagcctcatacctgaaaactctcggattgcactccgtagaaaatacaaaatcgagcttcaaaatatggtcagatcttggtttgcaatgcaagaccatacccttgattcgaacatacttatccaacatttgaatcatgacctatcttacttaggagccacaaaacgttttgcatacgatccagcgatgaccaagctctttactgagcttttgaaacgagagttatcaaattcaatcaataatggtgagcaacacactaatggatcgtttttagtcctaccgaatatcagggtttgtggcgcaacagctttaagctccccggtaacggtggggattccatcacttacagctttctttggcttcgttcacgcatttgaacggaatataaatcgcaccacctcatcgtttcgtgttgaatcctttgcgatatgcgtccatcaactacatgtcgagaagcgaggtttgacagcagagtttgtggaaaaaggcgacgggactatatccgctcccgcgacccgggatgactggcagtgtgatgtcgtatttagccttattttgaacaccaactttgctcaacatattgaccaagatacgttagttacatcactaccaaagcgattggctcggggttcagcaaaaattgcgattgatgactttaaacatatcaactcattctcgacattagaaacagcgatcgaatctctgccaatagaagctggtaggtggttatcactttacgcacagtcaaacaataatctaagtgatctattagcagccatgacagaggaccatcagctcatggcaagctgcgtcggttaccacttgttagaagagcccaaagataaaccaaactccctcagaggttacaaacacgctatcgccgagtgcatcattggactcattaactcaatcacctttagctcagagactgatcccaacacaatcttttggtcgctaaagaactatcaaaactacctagtggtacagccaaggagtatcaacgatgaaactaccgacaaatctagcctatgagcgctctatcgacccatcagatgtctgtttttttgtcgtctggcccgatgatagaaaaacacctttaacctacaattctcgtactctgctcgggcaaatggaagcggcatcattagcctatgatgtctcaggtcaaccaataaaaagtgccaccgctgaggcgttagctcaagggaaccctcatcaagttgatttctgccacgttccatacggtgcgagtcatattgaatgcagtttctccgtctcgttttcttctgaactacgtcaaccatataagtgtaactcaagcaaagttaaacaaacgctagtgcaattagtcgagctctacgaaacgaaaatcggctggactgagctagcaacccgatatttgatgaacatttgcaacggtaaatggctgtggaaaaatacccgtaaagcctattgctggaacattgtacttacaccttggccttggaacggggaaaaggttggatttgaagatattcgtactaactacacctcacggcaagactttaaaaataataaaaattggtctgctatagttgaaatgatcaaaaccgcattttctagtactgatgggctggcgatatttgaagtcagggccaccttgcacttgccaacgaatgctatggtgcggccaagccaagttttcacagaaaaagaaagtggcagtaaaagtaaatctaaaactcaaaacagtcgagtttttcagagtacaactattgatggtgaacgatcgccaatactaggggcctttaaaacgggagcagctattgcaaccattgacgactggtatcctgaagccactgagccactaagggtcggacggtttggggttcatcgcgaagatgtcacttgctaccgtcatccgtctaccggaaaagattttttctcgatattacaacaagcagagcactatattgaagtgttgagcgccaacaaaactcccgctcaagaaactatcaacgacatgcactttttaatggctaacctgattaagggtgggatgttccagcataaaggagactgactgtgaaatggtattataagacaatcacctttctgccagagttgtgcaacaacgagtcactggctgcaaagtgtctccgcgttctgcatggatttaactatcagtatgagacacgaaatatcggcgtttcatttccgctttggtgtgatgcaacggttggaaaaaagatttcatttgtcagcaagaacaagatagaactcgacttactacttaaacaacactatttcgtccaaatggaacaacttcaatactttcatatatccaacactgttctcgtcccagaagattgtacatacgtttcctttagacgctgtcaatctatagataagctcacagcagcagggctggcaaggaaaatcagacgcctggagaaacgtgctctatctagaggcgagcaatttgacccatcatcttttgctcaaaaagagcatactgcaatagcgcactaccactcacttggggagtccagcaaacagacgaaccgcaactttcgactcaatatcaggatgctctcggagcaaccccgtgaggggaactcgatttttagtagctatggcttatcaaattcagaaaactcgtttcagcctgtacccttaatctgacctaggctgctgccaccgctgagcaataactagcataaccccttggggcctctaaacgggtcttgaggggttttttgctgaaacctcaggcatttgagaagcacacggtcacactgcttccggtagtcaataaaccggtaaaccagcaatagacataagcggctatttaacgaccctgccctgaaccgacgaccgggtcatcgtggccggatcttgcggcccctcggcttgaacgaattgttagacattatttgccgactaccttggtgatctcgcctttcacgtagtggacaaattcttccaactgatctgcgcgcgaggccaagcgatcttcttcttgtccaagataagcctgtctagcttcaagtatgacgggctgatactgggccggcaggcgctccattgcccagtcggcagcgacatccttcggcgcgattttgccggttactgcgctgtaccaaatgcgggacaacgtaagcactacatttcgctcatcgccagcccagtcgggcggcgagttccatagcgttaaggtttcatttagcgcctcaaatagatcctgttcaggaaccggatcaaagagttcctccgccgctggacctaccaaggcaacgctatgttctcttgcttttgtcagcaagatagccagatcaatgtcgatcgtggctggctcgaagatacctgcaagaatgtcattgcgctgccattctccaaattgcagttcgcgcttagctggataacgccacggaatgatgtcgtcgtgcacaacaatggtgacttctacagcgcggagaatctcgctctctccaggggaagccgaagtttccaaaaggtcgttgatcaaagctcgccgcgttgtttcatcaagccttacggtcaccgtaaccagcaaatcaatatcactgtgtggcttcaggccgccatccactgcggagccgtacaaatgtacggccagcaacgtcggttcgagatggcgctcgatgacgccaactacctctgatagttgagtcgatacttcggcgatcaccgcttccctcatactcttcctttttcaatattattgaagcatttatcagggttattgtctcatgagcggatacatatttgaatgtatttagaaaaataaacaaatagctagctcactcggtcgctacgctccgggcgtgagactgcggcgggcgctgcggacacatacaaagttacccacagattccgtggataagcaggggactaacatgtgaggcaaaacagcagggccgcgccggtggcgtttttccataggctccgccctcctgccagagttcacataaacagacgcttttccggtgcatctgtgggagccgtgaggctcaaccatgaatctgacagtacgggcgaaacccgacaggacttaaagatccccaccgtttccggcgggtcgctccctcttgcgctctcctgttccgaccctgccgtttaccggatacctgttccgcctttctcccttacgggaagtgtggcgctttctcatagctcacacactggtatctcggctcggtgtaggtcgttcgctccaagctgggctgtaagcaagaactccccgttcagcccgactgctgcgccttatccggtaactgttcacttgagtccaacccggaaaagcacggtaaaacgccactggcagcagccattggtaactgggagttcgcagaggatttgtttagctaaacacgcggttgctcttgaagtgtgcgccaaagtccggctacactggaaggacagatttggttgctgtgctctgcgaaagccagttaccacggttaagcagttccccaactgacttaaccttcgatcaaaccacctccccaggtggttttttcgtttacagggcaaaagattacgcgcagaaaaaaaggatctcaagaagatcctttgatcttttctactgaaccgctctagatttcagtgcaatttatctcttcaaatgtagcacctgaagtcagccccatacgatataagttgtaattctcatgttagtcatgccccgcgcccaccggaaggagctgactgggttgaaggctctcaagggcatcggtcgagatcccggtgcctaatgagtgagctaacttacattaattgcgttgcgctcactgcccgctttccagtcgggaaacctgtcgtgccagctgcattaatgaatcggccaacgcgcggggagaggcggtttgcgtattgggcgccagggtggtttttcttttcaccagtgagacgggcaacagctgattgcccttcaccgcctggccctgagagagttgcagcaagcggtccacgctggtttgccccagcaggcgaaaatcctgtttgatggtggttaacggcgggatataacatgagctgtcttcggtatcgtcgtatcccactaccgagatgtccgcaccaacgcgcagcccggactcggtaatggcgcgcattgcgcccagcgccatctgatcgttggcaaccagcatcgcagtgggaacgatgccctcattcagcatttgcatggtttgttgaaaaccggacatggcactccagtcgccttcccgttccgctatcggctgaatttgattgcgagtgagatatttatgccagccagccagacgcagacgcgccgagacagaacttaatgggcccgctaacagcgcgatttgctggtgacccaatgcgaccagatgctccacgcccagtcgcgtaccgtcttcatgggagaaaataatactgttgatgggtgtctggtcagagacatcaagaaataacgccggaacattagtgcaggcagcttccacagcaatggcatcctggtcatccagcggatagttaatgatcagcccactgacgcgttgcgcgagaagattgtgcaccgccgctttacaggcttcgacgccgcttcgttctaccatcgacaccaccacgctggcacccagttgatcggcgcgagatttaatcgccgcgacaatttgcgacggcgcgtgcagggccagactggaggtggcaacgccaatcagcaacgactgtttgcccgccagttgttgtgccacgcggttgggaatgtaattcagctccgccatcgccgcttccactttttcccgcgttttcgcagaaacgtggctggcctggttcaccacgcgggaaacggtctgataagagacaccggcatactctgcgacatcgtataacgttactggtttcac

SEQ ID NO: 68 - DNA, 8497 bp, synthetic construct
  source 1..8497: mol_type = other DNA
attcaccaccctgaattgactctcttccgggcgctatcatgccataccgcgaaaggttttgcgccattcgatggtgtccgggatctcgacgctctcccttatgcgactcctgcattaggaaattaatacgactcactataggggaattgtgagcggataacaattcccctgtagaaataattttgtttaactttaataaggagatataccatgggtgaactgccgagtaggtagctgataacagtacagcgcggctgaaatcatcattaaagcggtgaactgccgagtaggtagctgataacggatccgaattcgagctcggcgcgcctgcaggtcgacaagcttgcggccgcataatgcttaagtcgaacagaaagtaatcgtattgtacacggccgcataatcgaaattaatacgactcactataggggaattgtgagcggataacaattccccatcttagtatattagttaagtataagaaggagatatacatatgtttttgcaaagacctaaaccttacagcgatgaaagtttagaaagtttctttatccgagtggctaacaaaaatggctacggtgatgtccatcgcttcctagaagccactaaacgattccttcaagacattgaccataatggctatcaaacctttccgactgatataactcggataaacccatactcagctaaaaacagttccagcgcacgaactgcgtcattcctgaaacttgcacaattgacatttaatgaaccgccagagctacttgggttggcaattaacagaacaaacatgaaatactcgccgtcaactagcgcggttgttagaggtgcagaagtctttcctcgcagtttactacggacgcactccatcccctgctgtcctttgtgtctgcgagaaaatggctacgcctcctacctttggcactttcaggggtacgaatactgccacagccataacgtacctttaattaccacttgtagctgtggtaaggagtttgactaccgagtatctgggttaaagggcatttgctgcaaatgcaaggagcctatcaccttaaccagcagggagaacggtcatgaggcagcgtgtactgtttcaaactggcttgctggccatgaatctaaacctctgccaaatcttcctaaaagctaccgatggggtttagttcattggtggatgggtattaaagatagcgagttcgatcacttttcgttcgttcaatttttctcaaactggccaaggtcattccactcgataatcgaagatgaagtagagttcaaccttgagcatgctgttgtcagcacgtctgaattacgactaaaagatcttcttggtcgattgtttttcggttcaattcggttacctgagcggaatcttcaacacaatatcatccttggtgagcttctctgctatttagaaaatcgtttatggcaagacaagggattaatcgccaacctcaaaatgaacgcgttagaggcgactgtaatgttaaattgtagcctcgatcagattgcatcaatggttgaacaacgcatcttgaagccaaatcgaaaaagcaagcccaacagccctcttgatgttaccgattatctatttcatttcggcgatattttctgtctttggttagctgagttccaaagcgatgagtttaaccgttcgttttatgtgtcgaggtggtaaaaggaggtaaataatgcctggacctaagaaaaagcgtaaagttggtaccggtatgcaaactctgaaagaactaatcgcatccaatcctgacgacttaacaactgaacttaagagagcatttcgtccactcacaccgcatattgcaattgatggtaatgaacttgacgcactgacgatattagtcaatttaaccgataagactgatgatcagaaagacctgctcgatcgagccaaatgcaagcaaaaacttcgagatgaaaaatggtgggctagctgcataaattgcgttaattacagacaaagccataacccaaaattcccggatatacgttctgaaggcgtgattcgaacccaagccctgggtgaattaccgagtttcctactctcgtcctcaaaaatcccaccataccattggtcatatagccatgattcaaaatacgtcaacaaaagcgcattcctcaccaatgagttttgttgggatggtgagatctcatgtttgggtgagcttcttaaagatgcagatcacccactttggaatactttgaaaaagttaggttgttctcaaaaaacttgcaaagcaatggcaaaacaactagctgatattactctcacgactatcaatgtcacactcgcaccaaattacctgactcaaatatctctccccgatagtgatacatcctacatttcactctctcctgttgcatcgctatcgatgcaaagccactttcatcagaggctccaagatgaaaatcggcatagcgcgataacgcggtttagccgaactaccaacatgggggtcactgcgatgacatgtggcggcgcatttagaatgttaaagtctggcgctaagttttccagcccccctcatcaccgattaaacagtaaacgaagttggttgacgtcagagcatgttcagtcattaaaacagtaccagcgcctcaacaaaagcctcatacctgaaaactctcggattgcactccgtagaaaatacaaaatcgagcttcaaaatatggtcagatcttggtttgcaatgcaagaccatacccttgattcgaacatacttatccaacatttgaatcatgacctatcttacttaggagccacaaaacgttttgcatacgatccagcgatgaccaagctctttactgagcttttgaaacgagagttatcaaattcaatcaataatggtgagcaacacactaatggatcgtttttagtcctaccgaatatcagggtttgtggcgcaacagctttaagctccccggtaacggtggggattccatcacttacagctttctttggcttcgttcacgcatttgaacggaatataaatcgcaccacctcatcgtttcgtgttgaatcctttgcgatatgcgtccatcaactacatgtcgagaagcgaggtttgacagcagagtttgtggaaaaaggcgacgggactatatccgctcccgcgacccgggatgactggcagtgtgatgtcgtatttagccttattttgaacaccaactttgctcaacatattgaccaagatacgttagttacatcactaccaaagcgattggctcggggttcagcaaaaattgcgattgatgactttaaacatatcaactcattctcgacattagaaacagcgatcgaatctctgccaatagaagctggtaggtggttatcactttacgcacagtcaaacaataatctaagtgatctattagcagccatgacagaggaccatcagctcatggcaagctgcgtcggttaccacttgttagaagagcccaaagataaaccaaactccctcagaggttacaaacacgctatcgccgagtgcatcattggactcattaactcaatcacctttagctcagagactgatcccaacacaatcttttggtcgctaaagaactatcaaaactacctagtggtacagccaaggagtatcaacgatgaaactaccgacaaatctagcctatgagcgctctatcgacccatcagatgtctgtttttttgtcgtctggcccgatgatagaaaaacacctttaacctacaattctcgtactctgctcgggcaaatggaagcggcatcattagcctatgatgtctcaggtcaaccaataaaaagtgccaccgctgaggcgttagctcaagggaaccctcatcaagttgatttctgccacgttccatacggtgcgagtcatattgaatgcagtttctccgtctcgttttcttctgaactacgtcaaccatataagtgtaactcaagcaaagttaaacaaacgctagtgcaattagtcgagctctacgaaacgaaaatcggctggactgagctagcaacccgatatttgatgaacatttgcaacggtaaatggctgtggaaaaatacccgtaaagcctattgctggaacattgtacttacaccttggccttggaacggggaaaaggttggatttgaagatattcgtactaactacacctcacggcaagactttaaaaataataaaaattggtctgctatagttgaaatgatcaaaaccgcattttctagtactgatgggctggcgatatttgaagtcagggccaccttgcacttgccaacgaatgctatggtgcggccaagccaagttttcacagaaaaagaaagtggcagtaaaagtaaatctaaaactcaaaacagtcgagtttttcagagtacaactattgatggtgaacgatcgccaatactaggggcctttaaaacgggagcagctattgcaaccattgacgactggtatcctgaagccactgagccactaagggtcggacggtttggggttcatcgcgaagatgtcacttgctaccgtcatccgtctaccggaaaagattttttctcgatattacaacaagcagagcactatattgaagtgttgagcgccaacaaaactcccgctcaagaaactatcaacgacatgcactttttaatggctaacctgattaagggtgggatgttccagcataaaggagactgactgtgaaatggtattataagacaatcacctttctgccagagttgtgcaacaacgagtcactggctgcaaagtgtctccgcgttctgcatggatttaactatcagtatgagacacgaaatatcggcgtttcatttccgctttggtgtgatgcaacggttggaaaaaagatttcatttgtcagcaagaacaagatagaactcgacttactacttaaacaacactatttcgtccaaatggaacaacttcaatactttcatatatccaacactgttctcgtcccagaagattgtacatacgtttcctttagacgctgtcaatctatagataagctcacagcagcagggctggcaaggaaaatcagacgcctggagaaacgtgctctatctagaggcgagcaatttgacccatcatcttttgctcaaaaagagcatactgcaatagcgcactaccactcacttggggagtccagcaaacagacgaaccgcaactttcgactcaatatcaggatgctctcggagcaaccccgtgaggggaactcgatttttagtagctatggcttatcaaattcagaaaactcgtttcagcctgtacccttaatctgacctaggctgctgccaccgctgagcaataactagcataaccccttggggcctctaaacgggtcttgaggggttttttgctgaaacctcaggcatttgagaagcacacggtcacactgcttccggtagtcaataaaccggtaaaccagcaatagacataagcggctatttaacgaccctgccctgaaccgacgaccgggtcatcgtggccggatcttgcggcccctcggcttgaacgaattgttagacattatttgccgactaccttggtgatctcgcctttcacgtagtggacaaattcttccaactgatctgcgcgcgaggccaagcgatcttcttcttgtccaagataagcctgtctagcttcaagtatgacgggctgatactgggccggcaggcgctccattgcccagtcggcagcgacatccttcggcgcgattttgccggttactgcgctgtaccaaatgcgggacaacgtaagcactacatttcgctcatcgccagcccagtcgggcggcgagttccatagcgttaaggtttcatttagcgcctcaaatagatcctgttcaggaaccggatcaaagagttcctccgccgctggacctaccaaggcaacgctatgttctcttgcttttgtcagcaagatagccagatcaatgtcgatcgtggctggctcgaagatacctgcaagaatgtcattgcgctgccattctccaaattgcagttcgcgcttagctggataacgccacggaatgatgtcgtcgtgcacaacaatggtgacttctacagcgcggagaatctcgctctctccaggggaagccgaagtttccaaaaggtcgttgatcaaagctcgccgcgttgtttcatcaagccttacggtcaccgtaaccagcaaatcaatatcactgtgtggcttcaggccgccatccactgcggagccgtacaaatgtacggccagcaacgtcggttcgagatggcgctcgatgacgccaactacctctgatagttgagtcgatacttcggcgatcaccgcttccctcatactcttcctttttcaatattattgaagcatttatcagggttattgtctcatgagcggatacatatttgaatgtatttagaaaaataaacaaatagctagctcactcggtcgctacgctccgggcgtgagactgcggcgggcgctgcggacacatacaaagttacccacagattccgtggataagcaggggactaacatgtgaggcaaaacagcagggccgcgccggtggcgtttttccataggctccgccctcctgccagagttcacataaacagacgcttttccggtgcatctgtgggagccgtgaggctcaaccatgaatctgacagtacgggcgaaacccgacaggacttaaagatccccaccgtttccggcgggtcgctccctcttgcgctctcctgttccgaccctgccgtttaccggatacctgttccgcctttctcccttacgggaagtgtggcgctttctcatagctcacacactggtatctcggctcggtgtaggtcgttcgctccaagctgggctgtaagcaagaactccccgttcagcccgactgctgcgccttatccggtaactgttcacttgagtccaacccggaaaagcacggtaaaacgccactggcagcagccattggtaactgggagttcgcagaggatttgtttagctaaacacgcggttgctcttgaagtgtgcgccaaagtccggctacactggaaggacagatttggttgctgtgctctgcgaaagccagttaccacggttaagcagttccccaactgacttaaccttcgatcaaaccacctccccaggtggttttttcgtttacagggcaaaagattacgcgcagaaaaaaaggatctcaagaagatcctttgatcttttctactgaaccgctctagatttcagtgcaatttatctcttcaaatgtagcacctgaagtcagccccatacgatataagttgtaattctcatgttagtcatgccccgcgcccaccggaaggagctgactgggttgaaggctctcaagggcatcggtcgagatcccggtgcctaatgagtgagctaacttacattaattgcgttgcgctcactgcccgctttccagtcgggaaacctgtcgtgccagctgcattaatgaatcggccaacgcgcggggagaggcggtttgcgtattgggcgccagggtggtttttcttttcaccagtgagacgggcaacagctgattgcccttcaccgcctggccctgagagagttgcagcaagcggtccacgctggtttgccccagcaggcgaaaatcctgtttgatggtggttaacggcgggatataacatgagctgtcttcggtatcgtcgtatcccactaccgagatgtccgcaccaacgcgcagcccggactcggtaatggcgcgcattgcgcccagcgccatctgatcgttggcaaccagcatcgcagtgggaacgatgccctcattcagcatttgcatggtttgttgaaaaccggacatggcactccagtcgccttcccgttccgctatcggctgaatttgattgcgagtgagatatttatgccagccagccagacgcagacgcgccgagacagaacttaatgggcccgctaacagcgcgatttgctggtgacccaatgcgaccagatgctccacgcccagtcgcgtaccgtcttcatgggagaaaataatactgttgatgggtgtctggtcagagacatcaagaaataacgccggaacattagtgcaggcagcttccacagcaatggcatcctggtcatccagcggatagttaatgatcagcccactgacgcgttgcgcgagaagattgtgcaccgccgctttacaggcttcgacgccgcttcgttctaccatcgacaccaccacgctggcacccagttgatcggcgcgagatttaatcgccgcgacaatttgcgacggcgcgtgcagggccagactggaggtggcaacgccaatcagcaacgactgtttgcccgccagttgttgtgccacgcggttgggaatgtaattcagctccgccatcgccgcttccactttttcccgcgttttcgcagaaacgtggctggcctggttcaccacgcgggaaacggtctgataagagacaccggcatactctgcgacatcgtataacgttactggtttcac

SEQ ID NO: 69 - DNA, 8548 bp, synthetic construct
  source 1..8548: mol_type = other DNA
attcaccaccctgaattgactctcttccgggcgctatcatgccataccgcgaaaggttttgcgccattcgatggtgtccgggatctcgacgctctcccttatgcgactcctgcattaggaaattaatacgactcactataggggaattgtgagcggataacaattcccctgtagaaataattttgtttaactttaataaggagatataccatgggtgaactgccgagtaggtagctgataacagtacagcgcggctgaaatcatcattaaagcggtgaactgccgagtaggtagctgataacggatccgaattcgagctcggcgcgcctgcaggtcgacaagcttgcggccgcataatgcttaagtcgaacagaaagtaatcgtattgtacacggccgcataatcgaaattaatacgactcactataggggaattgtgagcggataacaattccccatcttagtatattagttaagtataagaaggagatatacatatgtttttgcaaagacctaaaccttacagcgatgaaagtttagaaagtttctttatccgagtggctaacaaaaatggctacggtgatgtccatcgcttcctagaagccactaaacgattccttcaagacattgaccataatggctatcaaacctttccgactgatataactcggataaacccatactcagctaaaaacagttccagcgcacgaactgcgtcattcctgaaacttgcacaattgacatttaatgaaccgccagagctacttgggttggcaattaacagaacaaacatgaaatactcgccgtcaactagcgcggttgttagaggtgcagaagtctttcctcgcagtttactacggacgcactccatcccctgctgtcctttgtgtctgcgagaaaatggctacgcctcctacctttggcactttcaggggtacgaatactgccacagccataacgtacctttaattaccacttgtagctgtggtaaggagtttgactaccgagtatctgggttaaagggcatttgctgcaaatgcaaggagcctatcaccttaaccagcagggagaacggtcatgaggcagcgtgtactgtttcaaactggcttgctggccatgaatctaaacctctgccaaatcttcctaaaagctaccgatggggtttagttcattggtggatgggtattaaagatagcgagttcgatcacttttcgttcgttcaatttttctcaaactggccaaggtcattccactcgataatcgaagatgaagtagagttcaaccttgagcatgctgttgtcagcacgtctgaattacgactaaaagatcttcttggtcgattgtttttcggttcaattcggttacctgagcggaatcttcaacacaatatcatccttggtgagcttctctgctatttagaaaatcgtttatggcaagacaagggattaatcgccaacctcaaaatgaacgcgttagaggcgactgtaatgttaaattgtagcctcgatcagattgcatcaatggttgaacaacgcatcttgaagccaaatcgaaaaagcaagcccaacagccctcttgatgttaccgattatctatttcatttcggcgatattttctgtctttggttagctgagttccaaagcgatgagtttaaccgttcgttttatgtgtcgaggtggtaaatgcaaactctgaaagaactaatcgcatccaatcctgacgacttaacaactgaacttaagagagcatttcgtccactcacaccgcatattgcaattgatggtaatgaacttgacgcactgacgatattagtcaatttaaccgataagactgatgatcagaaagacctgctcgatcgagccaaatgcaagcaaaaacttcgagatgaaaaatggtgggctagctgcataaattgcgttaattacagacaaagccataacccaaaattcccggatatacgttctgaaggcgtgattcgaacccaagccctgggtgaattaccgagtttcctactctcgtcctcaaaaatcccaccataccattggtcatatagccatgattcaaaatacgtcaacaaaagcgcattcctcaccaatgagttttgttgggatggtgagatctcatgtttgggtgagcttcttaaagatgcagatcacccactttggaatactttgaaaaagttaggttgttctcaaaaaacttgcaaagcaatggcaaaacaactagctgatattactctcacgactatcaatgtcacactcgcaccaaattacctgactcaaatatctctccccgatagtgatacatcctacatttcactctctcctgttgcatcgctatcgatgcaaagccactttcatcagaggctccaagatgaaaatcggcatagcgcgataacgcggtttagccgaactaccaacatgggggtcactgcgatgacatgtggcggcgcatttagaatgttaaagtctggcgctaagttttccagcccccctcatcaccgattaaacagtaaacgaagttggttgacgtcagagcatgttcagtcattaaaacagtaccagcgcctcaacaaaagcctcatacctgaaaactctcggattgcactccgtagaaaatacaaaatcgagcttcaaaatatggtcagatcttggtttgcaatgcaagaccatacccttgattcgaacatacttatccaacatttgaatcatgacctatcttacttaggagccacaaaacgttttgcatacgatccagcgatgaccaagctctttactgagcttttgaaacgagagttatcaaattcaatcaataatggtgagcaacacactaatggatcgtttttagtcctaccgaatatcagggtttgtggcgcaacagctttaagctccccggtaacggtggggattccatcacttacagctttctttggcttcgttcacgcatttgaacggaatataaatcgcaccacctcatcgtttcgtgttgaatcctttgcgatatgcgtccatcaactacatgtcgagaagcgaggtttgacagcagagtttgtggaaaaaggcgacgggactatatccgctcccgcgacccgggatgactggcagtgtgatgtcgtatttagccttattttgaacaccaactttgctcaacatattgaccaagatacgttagttacatcactaccaaagcgattggctcggggttcagcaaaaattgcgattgatgactttaaacatatcaactcattctcgacattagaaacagcgatcgaatctctgccaatagaagctggtaggtggttatcactttacgcacagtcaaacaataatctaagtgatctattagcagccatgacagaggaccatcagctcatggcaagctgcgtcggttaccacttgttagaagagcccaaagataaaccaaactccctcagaggttacaaacacgctatcgccgagtgcatcattggactcattaactcaatcacctttagctcagagactgatcccaacacaatcttttggtcgctaaagaactatcaaaactacctagtggtacagccaaggagtatcaacgatgaaaccacagataagtcctcattagggtcctcggagggtcgtggcagtcttttgacttgcggtgatgtagaagagaaccctggctaagaaggaggtaaataatgaaactaccgacaaatctagcctatgagcgctctatcgacccatcagatgtctgtttttttgtcgtctggcccgatgatagaaaaacacctttaacctacaattctcgtactctgctcgggcaaatggaagcggcatcattagcctatgatgtctcaggtcaaccaataaaaagtgccaccgctgaggcgttagctcaagggaaccctcatcaagttgatttctgccacgttccatacggtgcgagtcatattgaatgcagtttctccgtctcgttttcttctgaactacgtcaaccatataagtgtaactcaagcaaagttaaacaaacgctagtgcaattagtcgagctctacgaaacgaaaatcggctggactgagctagcaacccgatatttgatgaacatttgcaacggtaaatggctgtggaaaaatacccgtaaagcctattgctggaacattgtacttacaccttggccttggaacggggaaaaggttggatttgaagatattcgtactaactacacctcacggcaagactttaaaaataataaaaattggtctgctatagttgaaatgatcaaaaccgcattttctagtactgatgggctggcgatatttgaagtcagggccaccttgcacttgccaacgaatgctatggtgcggccaagccaagttttcacagaaaaagaaagtggcagtaaaagtaaatctaaaactcaaaacagtcgagtttttcagagtacaactattgatggtgaacgatcgccaatactaggggcctttaaaacgggagcagctattgcaaccattgacgactggtatcctgaagccactgagccactaagggtcggacggtttggggttcatcgcgaagatgtcacttgctaccgtcatccgtctaccggaaaagattttttctcgatattacaacaagcagagcactatattgaagtgttgagcgccaacaaaactcccgctcaagaaactatcaacgacatgcactttttaatggctaacctgattaagggtgggatgttccagcataaaggagactgactgtgaaatggtattataagacaatcacctttctgccagagttgtgcaacaacgagtcactggctgcaaagtgtctccgcgttctgcatggatttaactatcagtatgagacacgaaatatcggcgtttcatttccgctttggtgtgatgcaacggttggaaaaaagatttcatttgtcagcaagaacaagatagaactcgacttactacttaaacaacactatttcgtccaaatggaacaacttcaatactttcatatatccaacactgttctcgtcccagaagattgtacatacgtttcctttagacgctgtcaatctatagataagctcacagcagcagggctggcaaggaaaatcagacgcctggagaaacgtgctctatctagaggcgagcaatttgacccatcatcttttgctcaaaaagagcatactgcaatagcgcactaccactcacttggggagtccagcaaacagacgaaccgcaactttcgactcaatatcaggatgctctcggagcaaccccgtgaggggaactcgatttttagtagctatggcttatcaaattcagaaaactcgtttcagcctgtacccttaatctgacctaggctgctgccaccgctgagcaataactagcataaccccttggggcctctaaacgggtcttgaggggttttttgctgaaacctcaggcatttgagaagcacacggtcacactgcttccggtagtcaataaaccggtaaaccagcaatagacataagcggctatttaacgaccctgccctgaaccgacgaccgggtcatcgtggccggatcttgcggcccctcggcttgaacgaattgttagacattatttgccgactaccttggtgatctcgcctttcacgtagtggacaaattcttccaactgatctgcgcgcgaggccaagcgatcttcttcttgtccaagataagcctgtctagcttcaagtatgacgggctgatactgggccggcaggcgctccattgcccagtcggcagcgacatccttcggcgcgattttgccggttactgcgctgtaccaaatgcgggacaacgtaagcactacatttcgctcatcgccagcccagtcgggcggcgagttccatagcgttaaggtttcatttagcgcctcaaatagatcctgttcaggaaccggatcaaagagttcctccgccgctggacctaccaaggcaacgctatgttctcttgcttttgtcagcaagatagccagatcaatgtcgatcgtggctggctcgaagatacctgcaagaatgtcattgcgctgccattctccaaattgcagttcgcgcttagctggataacgccacggaatgatgtcgtcgtgcacaacaatggtgacttctacagcgcggagaatctcgctctctccaggggaagccgaagtttccaaaaggtcgttgatcaaagctcgccgcgttgtttcatcaagccttacggtcaccgtaaccagcaaatcaatatcactgtgtggcttcaggccgccatccactgcggagccgtacaaatgtacggccagcaacgtcggttcgagatggcgctcgatgacgccaactacctctgatagttgagtcgatacttcggcgatcaccgcttccctcatactcttcctttttcaatattattgaagcatttatcagggttattgtctcatgagcggatacatatttgaatgtatttagaaaaataaacaaatagctagctcactcggtcgctacgctccgggcgtgagactgcggcgggcgctgcggacacatacaaagttacccacagattccgtggataagcaggggactaacatgtgaggcaaaacagcagggccgcgccggtggcgtttttccataggctccgccctcctgccagagttcacataaacagacgcttttccggtgcatctgtgggagccgtgaggctcaaccatgaatctgacagtacgggcgaaacccgacaggacttaaagatccccaccgtttccggcgggtcgctccctcttgcgctctcctgttccgaccctgccgtttaccggatacctgttccgcctttctcccttacgggaagtgtggcgctttctcatagctcacacactggtatctcggctcggtgtaggtcgttcgctccaagctgggctgtaagcaagaactccccgttcagcccgactgctgcgccttatccggtaactgttcacttgagtccaacccggaaaagcacggtaaaacgccactggcagcagccattggtaactgggagttcgcagaggatttgtttagctaaacacgcggttgctcttgaagtgtgcgccaaagtccggctacactggaaggacagatttggttgctgtgctctgcgaaagccagttaccacggttaagcagttccccaactgacttaaccttcgatcaaaccacctccccaggtggttttttcgtttacagggcaaaagattacgcgcagaaaaaaaggatctcaagaagatcctttgatcttttctactgaaccgctctagatttcagtgcaatttatctcttcaaatgtagcacctgaagtcagccccatacgatataagttgtaattctcatgttagtcatgccccgcgcccaccggaaggagctgactgggttgaaggctctcaagggcatcggtcgagatcccggtgcctaatgagtgagctaacttacattaattgcgttgcgctcactgcccgctttccagtcgggaaacctgtcgtgccagctgcattaatgaatcggccaacgcgcggggagaggcggtttgcgtattgggcgccagggtggtttttcttttcaccagtgagacgggcaacagctgattgcccttcaccgcctggccctgagagagttgcagcaagcggtccacgctggtttgccccagcaggcgaaaatcctgtttgatggtggttaacggcgggatataacatgagctgtcttcggtatcgtcgtatcccactaccgagatgtccgcaccaacgcgcagcccggactcggtaatggcgcgcattgcgcccagcgccatctgatcgttggcaaccagcatcgcagtgggaacgatgccctcattcagcatttgcatggtttgttgaaaaccggacatggcactccagtcgccttcccgttccgctatcggctgaatttgattgcgagtgagatatttatgccagccagccagacgcagacgcgccgagacagaacttaatgggcccgctaacagcgcgatttgctggtgacccaatgcgaccagatgctccacgcccagtcgcgtaccgtcttcatgggagaaaataatactgttgatgggtgtctggtcagagacatcaagaaataacgccggaacattagtgcaggcagcttccacagcaatggcatcctggtcatccagcggatagttaatgatcagcccactgacgcgttgcgcgagaagattgtgcaccgccgctttacaggcttcgacgccgcttcgttctaccatcgacaccaccacgctggcacccagttgatcggcgcgagatttaatcgccgcgacaatttgcgacggcgcgtgcagggccagactggaggtggcaacgccaatcagcaacgactgtttgcccgccagttgttgtgccacgcggttgggaatgtaattcagctccgccatcgccgcttccactttttcccgcgttttcgcagaaacgtggctggcctggttcaccacgcgggaaacggtctgataagagacaccggcatactctgcgacatcgtataacgttactggtttcac

SEQ ID NO: 70 - DNA, 8524 bp, synthetic construct
  source 1..8524: mol_type = other DNA
attcaccaccctgaattgactctcttccgggcgctatcatgccataccgcgaaaggttttgcgccattcgatggtgtccgggatctcgacgctctcccttatgcgactcctgcattaggaaattaatacgactcactataggggaattgtgagcggataacaattcccctgtagaaataattttgtttaactttaataaggagatataccatgggtgaactgccgagtaggtagctgataacagtacagcgcggctgaaatcatcattaaagcggtgaactgccgagtaggtagctgataacggatccgaattcgagctcggcgcgcctgcaggtcgacaagcttgcggccgcataatgcttaagtcgaacagaaagtaatcgtattgtacacggccgcataatcgaaattaatacgactcactataggggaattgtgagcggataacaattccccatcttagtatattagttaagtataagaaggagatatacatatgtttttgcaaagacctaaaccttacagcgatgaaagtttagaaagtttctttatccgagtggctaacaaaaatggctacggtgatgtccatcgcttcctagaagccactaaacgattccttcaagacattgaccataatggctatcaaacctttccgactgatataactcggataaacccatactcagctaaaaacagttccagcgcacgaactgcgtcattcctgaaacttgcacaattgacatttaatgaaccgccagagctacttgggttggcaattaacagaacaaacatgaaatactcgccgtcaactagcgcggttgttagaggtgcagaagtctttcctcgcagtttactacggacgcactccatcccctgctgtcctttgtgtctgcgagaaaatggctacgcctcctacctttggcactttcaggggtacgaatactgccacagccataacgtacctttaattaccacttgtagctgtggtaaggagtttgactaccgagtatctgggttaaagggcatttgctgcaaatgcaaggagcctatcaccttaaccagcagggagaacggtcatgaggcagcgtgtactgtttcaaactggcttgctggccatgaatctaaacctctgccaaatcttcctaaaagctaccgatggggtttagttcattggtggatgggtattaaagatagcgagttcgatcacttttcgttcgttcaatttttctcaaactggccaaggtcattccactcgataatcgaagatgaagtagagttcaaccttgagcatgctgttgtcagcacgtctgaattacgactaaaagatcttcttggtcgattgtttttcggttcaattcggttacctgagcggaatcttcaacacaatatcatccttggtgagcttctctgctatttagaaaatcgtttatggcaagacaagggattaatcgccaacctcaaaatgaacgcgttagaggcgactgtaatgttaaattgtagcctcgatcagattgcatcaatggttgaacaacgcatcttgaagccaaatcgaaaaagcaagcccaacagccctcttgatgttaccgattatctatttcatttcggcgatattttctgtctttggttagctgagttccaaagcgatgagtttaaccgttcgttttatgtgtcgaggtggtaaatgcaaactctgaaagaactaatcgcatccaatcctgacgacttaacaactgaacttaagagagcatttcgtccactcacaccgcatattgcaattgatggtaatgaacttgacgcactgacgatattagtcaatttaaccgataagactgatgatcagaaagacctgctcgatcgagccaaatgcaagcaaaaacttcgagatgaaaaatggtgggctagctgcataaattgcgttaattacagacaaagccataacccaaaattcccggatatacgttctgaaggcgtgattcgaacccaagccctgggtgaattaccgagtttcctactctcgtcctcaaaaatcccaccataccattggtcatatagccatgattcaaaatacgtcaacaaaagcgcattcctcaccaatgagttttgttgggatggtgagatctcatgtttgggtgagcttcttaaagatgcagatcacccactttggaatactttgaaaaagttaggttgttctcaaaaaacttgcaaagcaatggcaaaacaactagctgatattactctcacgactatcaatgtcacactcgcaccaaattacctgactcaaatatctctccccgatagtgatacatcctacatttcactctctcctgttgcatcgctatcgatgcaaagccactttcatcagaggctccaagatgaaaatcggcatagcgcgataacgcggtttagccgaactaccaacatgggggtcactgcgatgacatgtggcggcgcatttagaatgttaaagtctggcgctaagttttccagcccccctcatcaccgattaaacagtaaacgaagttggttgacgtcagagcatgttcagtcattaaaacagtaccagcgcctcaacaaaagcctcatacctgaaaactctcggattgcactccgtagaaaatacaaaatcgagcttcaaaatatggtcagatcttggtttgcaatgcaagaccatacccttgattcgaacatacttatccaacatttgaatcatgacctatcttacttaggagccacaaaacgttttgcatacgatccagcgatgaccaagctctttactgagcttttgaaacgagagttatcaaattcaatcaataatggtgagcaacacactaatggatcgtttttagtcctaccgaatatcagggtttgtggcgcaacagctttaagctccccggtaacggtggggattccatcacttacagctttctttggcttcgttcacgcatttgaacggaatataaatcgcaccacctcatcgtttcgtgttgaatcctttgcgatatgcgtccatcaactacatgtcgagaagcgaggtttgacagcagagtttgtggaaaaaggcgacgggactatatccgctcccgcgacccgggatgactggcagtgtgatgtcgtatttagccttattttgaacaccaactttgctcaacatattgaccaagatacgttagttacatcactaccaaagcgattggctcggggttcagcaaaaattgcgattgatgactttaaacatatcaactcattctcgacattagaaacagcgatcgaatctctgccaatagaagctggtaggtggttatcactttacgcacagtcaaacaataatctaagtgatctattagcagccatgacagaggaccatcagctcatggcaagctgcgtcggttaccacttgttagaagagcccaaagataaaccaaactccctcagaggttacaaacacgctatcgccgagtgcatcattggactcattaactcaatcacctttagctcagagactgatcccaacacaatcttttggtcgctaaagaactatcaaaactacctagtggtacagccaaggagtatcaacgatgaaaccacagataagtcctcattataagaaggaggtaaataatgggacctaagaaaaagcgtaaagttggttctgccatgaaactaccgacaaatctagcctatgagcgctctatcgacccatcagatgtctgtttttttgtcgtctggcccgatgatagaaaaacacctttaacctacaattctcgtactctgctcgggcaaatggaagcggcatcattagcctatgatgtctcaggtcaaccaataaaaagtgccaccgctgaggcgttagctcaagggaaccctcatcaagttgatttctgccacgttccatacggtgcgagtcatattgaatgcagtttctccgtctcgttttcttctgaactacgtcaaccatataagtgtaactcaagcaaagttaaacaaacgctagtgcaattagtcgagctctacgaaacgaaaatcggctggactgagctagcaacccgatatttgatgaacatttgcaacggtaaatggctgtggaaaaatacccgtaaagcctattgctggaacattgtacttacaccttggccttggaacggggaaaaggttggatttgaagatattcgtactaactacacctcacggcaagactttaaaaataataaaaattggtctgctatagttgaaatgatcaaaaccgcattttctagtactgatgggctggcgatatttgaagtcagggccaccttgcacttgccaacgaatgctatggtgcggccaagccaagttttcacagaaaaagaaagtggcagtaaaagtaaatctaaaactcaaaacagtcgagtttttcagagtacaactattgatggtgaacgatcgccaatactaggggcctttaaaacgggagcagctattgcaaccattgacgactggtatcctgaagccactgagccactaagggtcggacggtttggggttcatcgcgaagatgtcacttgctaccgtcatccgtctaccggaaaagattttttctcgatattacaacaagcagagcactatattgaagtgttgagcgccaacaaaactcccgctcaagaaactatcaacgacatgcactttttaatggctaacctgattaagggtgggatgttccagcataaaggagactgactgtgaaatggtattataagacaatcacctttctgccagagttgtgcaacaacgagtcactggctgcaaagtgtctccgcgttctgcatggatttaactatcagtatgagacacgaaatatcggcgtttcatttccgctttggtgtgatgcaacggttggaaaaaagatttcatttgtcagcaagaacaagatagaactcgacttactacttaaacaacactatttcgtccaaatggaacaacttcaatactttcatatatccaacactgttctcgtcccagaagattgtacatacgtttcctttagacgctgtcaatctatagataagctcacagcagcagggctggcaaggaaaatcagacgcctggagaaacgtgctctatctagaggcgagcaatttgacccatcatcttttgctcaaaaagagcatactgcaatagcgcactaccactcacttggggagtccagcaaacagacgaaccgcaactttcgactcaatatcaggatgctctcggagcaaccccgtgaggggaactcgatttttagtagctatggcttatcaaattcagaaaactcgtttcagcctgtacccttaatctgacctaggctgctgccaccgctgagcaataactagcataaccccttggggcctctaaacgggtcttgaggggttttttgctgaaacctcaggcatttgagaagcacacggtcacactgcttccggtagtcaataaaccggtaaaccagcaatagacataagcggctatttaacgaccctgccctgaaccgacgaccgggtcatcgtggccggatcttgcggcccctcggcttgaacgaattgttagacattatttgccgactaccttggtgatctcgcctttcacgtagtggacaaattcttccaactgatctgcgcgcgaggccaagcgatcttcttcttgtccaagataagcctgtctagcttcaagtatgacgggctgatactgggccggcaggcgctccattgcccagtcggcagcgacatccttcggcgcgattttgccggttactgcgctgtaccaaatgcgggacaacgtaagcactacatttcgctcatcgccagcccagtcgggcggcgagttccatagcgttaaggtttcatttagcgcctcaaatagatcctgttcaggaaccggatcaaagagttcctccgccgctggacctaccaaggcaacgctatgttctcttgcttttgtcagcaagatagccagatcaatgtcgatcgtggctggctcgaagatacctgcaagaatgtcattgcgctgccattctccaaattgcagttcgcgcttagctggataacgccacggaatgatgtcgtcgtgcacaacaatggtgacttctacagcgcggagaatctcgctctctccaggggaagccgaagtttccaaaaggtcgttgatcaaagctcgccgcgttgtttcatcaagccttacggtcaccgtaaccagcaaatcaatatcactgtgtggcttcaggccgccatccactgcggagccgtacaaatgtacggccagcaacgtcggttcgagatggcgctcgatgacgccaactacctctgatagttgagtcgatacttcggcgatcaccgcttccctcatactcttcctttttcaatattattgaagcatttatcagggttattgtctcatgagcggatacatatttgaatgtatttagaaaaataaacaaatagctagctcactcggtcgctacgctccgggcgtgagactgcggcgggcgctgcggacacatacaaagttacccacagattccgtggataagcaggggactaacatgtgaggcaaaacagcagggccgcgccggtggcgtttttccataggctccgccctcctgccagagttcacataaacagacgcttttccggtgcatctgtgggagccgtgaggctcaaccatgaatctgacagtacgggcgaaacccgacaggacttaaagatccccaccgtttccggcgggtcgctccctcttgcgctctcctgttccgaccctgccgtttaccggatacctgttccgcctttctcccttacgggaagtgtggcgctttctcatagctcacacactggtatctcggctcggtgtaggtcgttcgctccaagctgggctgtaagcaagaactccccgttcagcccgactgctgcgccttatccggtaactgttcacttgagtccaacccggaaaagcacggtaaaacgccactggcagcagccattggtaactgggagttcgcagaggatttgtttagctaaacacgcggttgctcttgaagtgtgcgccaaagtccggctacactggaaggacagatttggttgctgtgctctgcgaaagccagttaccacggttaagcagttccccaactgacttaaccttcgatcaaaccacctccccaggtggttttttcgtttacagggcaaaagattacgcgcagaaaaaaaggatctcaagaagatcctttgatcttttctactgaaccgctctagatttcagtgcaatttatctcttcaaatgtagcacctgaagtcagccccatacgatataagttgtaattctcatgttagtcatgccccgcgcccaccggaaggagctgactgggttgaaggctctcaagggcatcggtcgagatcccggtgcctaatgagtgagctaacttacattaattgcgttgcgctcactgcccgctttccagtcgggaaacctgtcgtgccagctgcattaatgaatcggccaacgcgcggggagaggcggtttgcgtattgggcgccagggtggtttttcttttcaccagtgagacgggcaacagctgattgcccttcaccgcctggccctgagagagttgcagcaagcggtccacgctggtttgccccagcaggcgaaaatcctgtttgatggtggttaacggcgggatataacatgagctgtcttcggtatcgtcgtatcccactaccgagatgtccgcaccaacgcgcagcccggactcggtaatggcgcgcattgcgcccagcgccatctgatcgttggcaaccagcatcgcagtgggaacgatgccctcattcagcatttgcatggtttgttgaaaaccggacatggcactccagtcgccttcccgttccgctatcggctgaatttgattgcgagtgagatatttatgccagccagccagacgcagacgcgccgagacagaacttaatgggcccgctaacagcgcgatttgctggtgacccaatgcgaccagatgctccacgcccagtcgcgtaccgtcttcatgggagaaaataatactgttgatgggtgtctggtcagagacatcaagaaataacgccggaacattagtgcaggcagcttccacagcaatggcatcctggtcatccagcggatagttaatgatcagcccactgacgcgttgcgcgagaagattgtgcaccgccgctttacaggcttcgacgccgcttcgttctaccatcgacaccaccacgctggcacccagttgatcggcgcgagatttaatcgccgcgacaatttgcgacggcgcgtgcagggccagactggaggtggcaacgccaatcagcaacgactgtttgcccgccagttgttgtgccacgcggttgggaatgtaattcagctccgccatcgccgcttccactttttcccgcgttttcgcagaaacgtggctggcctggttcaccacgcgggaaacggtctgataagagacaccggcatactctgcgacatcgtataacgttactggtttcac

SEQ ID NO: 71 - DNA, 8516 bp, synthetic construct
  source 1..8516: mol_type = other DNA
attcaccaccctgaattgactctcttccgggcgctatcatgccataccgcgaaaggttttgcgccattcgatggtgtccgggatctcgacgctctcccttatgcgactcctgcattaggaaattaatacgactcactataggggaattgtgagcggataacaattcccctgtagaaataattttgtttaactttaataaggagatataccatgggtgaactgccgagtaggtagctgataacagtacagcgcggctgaaatcatcattaaagcggtgaactgccgagtaggtagctgataacggatccgaattcgagctcggcgcgcctgcaggtcgacaagcttgcggccgcataatgcttaagtcgaacagaaagtaatcgtattgtacacggccgcataatcgaaattaatacgactcactataggggaattgtgagcggataacaattccccatcttagtatattagttaagtataagaaggagatatacatatgtttttgcaaagacctaaaccttacagcgatgaaagtttagaaagtttctttatccgagtggctaacaaaaatggctacggtgatgtccatcgcttcctagaagccactaaacgattccttcaagacattgaccataatggctatcaaacctttccgactgatataactcggataaacccatactcagctaaaaacagttccagcgcacgaactgcgtcattcctgaaacttgcacaattgacatttaatgaaccgccagagctacttgggttggcaattaacagaacaaacatgaaatactcgccgtcaactagcgcggttgttagaggtgcagaagtctttcctcgcagtttactacggacgcactccatcccctgctgtcctttgtgtctgcgagaaaatggctacgcctcctacctttggcactttcaggggtacgaatactgccacagccataacgtacctttaattaccacttgtagctgtggtaaggagtttgactaccgagtatctgggttaaagggcatttgctgcaaatgcaaggagcctatcaccttaaccagcagggagaacggtcatgaggcagcgtgtactgtttcaaactggcttgctggccatgaatctaaacctctgccaaatcttcctaaaagctaccgatggggtttagttcattggtggatgggtattaaagatagcgagttcgatcacttttcgttcgttcaatttttctcaaactggccaaggtcattccactcgataatcgaagatgaagtagagttcaaccttgagcatgctgttgtcagcacgtctgaattacgactaaaagatcttcttggtcgattgtttttcggttcaattcggttacctgagcggaatcttcaacacaatatcatccttggtgagcttctctgctatttagaaaatcgtttatggcaagacaagggattaatcgccaacctcaaaatgaacgcgttagaggcgactgtaatgttaaattgtagcctcgatcagattgcatcaatggttgaacaacgcatcttgaagccaaatcgaaaaagcaagcccaacagccctcttgatgttaccgattatctatttcatttcggcgatattttctgtctttggttagctgagttccaaagcgatgagtttaaccgttcgttttatgtgtcgaggtggtaaatgcaaactctgaaagaactaatcgcatccaatcctgacgacttaacaactgaacttaagagagcatttcgtccactcacaccgcatattgcaattgatggtaatgaacttgacgcactgacgatattagtcaatttaaccgataagactgatgatcagaaagacctgctcgatcgagccaaatgcaagcaaaaacttcgagatgaaaaatggtgggctagctgcataaattgcgttaattacagacaaagccataacccaaaattcccggatatacgttctgaaggcgtgattcgaacccaagccctgggtgaattaccgagtttcctactctcgtcctcaaaaatcccaccataccattggtcatatagccatgattcaaaatacgtcaacaaaagcgcattcctcaccaatgagttttgttgggatggtgagatctcatgtttgggtgagcttcttaaagatgcagatcacccactttggaatactttgaaaaagttaggttgttctcaaaaaacttgcaaagcaatggcaaaacaactagctgatattactctcacgactatcaatgtcacactcgcaccaaattacctgactcaaatatctctccccgatagtgatacatcctacatttcactctctcctgttgcatcgctatcgatgcaaagccactttcatcagaggctccaagatgaaaatcggcatagcgcgataacgcggtttagccgaactaccaacatgggggtcactgcgatgacatgtggcggcgcatttagaatgttaaagtctggcgctaagttttccagcccccctcatcaccgattaaacagtaaacgaagttggttgacgtcagagcatgttcagtcattaaaacagtaccagcgcctcaacaaaagcctcatacctgaaaactctcggattgcactccgtagaaaatacaaaatcgagcttcaaaatatggtcagatcttggtttgcaatgcaagaccatacccttgattcgaacatacttatccaacatttgaatcatgacctatcttacttaggagccacaaaacgttttgcatacgatccagcgatgaccaagctctttactgagcttttgaaacgagagttatcaaattcaatcaataatggtgagcaacacactaatggatcgtttttagtcctaccgaatatcagggtttgtggcgcaacagctttaagctccccggtaacggtggggattccatcacttacagctttctttggcttcgttcacgcatttgaacggaatataaatcgcaccacctcatcgtttcgtgttgaatcctttgcgatatgcgtccatcaactacatgtcgagaagcgaggtttgacagcagagtttgtggaaaaaggcgacgggactatatccgctcccgcgacccgggatgactggcagtgtgatgtcgtatttagccttattttgaacaccaactttgctcaacatattgaccaagatacgttagttacatcactaccaaagcgattggctcggggttcagcaaaaattgcgattgatgactttaaacatatcaactcattctcgacattagaaacagcgatcgaatctctgccaatagaagctggtaggtggttatcactttacgcacagtcaaacaataatctaagtgatctattagcagccatgacagaggaccatcagctcatggcaagctgcgtcggttaccacttgttagaagagcccaaagataaaccaaactccctcagaggttacaaacacgctatcgccgagtgcatcattggactcattaactcaatcacctttagctcagagactgatcccaacacaatcttttggtcgctaaagaactatcaaaactacctagtggtacagccaaggagtatcaacgatgaaactaccgacaaatctagcctatgagcgctctatcgacccatcagatgtctgtttttttgtcgtctggcccgatgatagaaaaacacctttaacctacaattctcgtactctgctcgggcaaatggaagcggcatcattagcctatgatgtctcaggtcaaccaataaaaagtgccaccgctgaggcgttagctcaagggaaccctcatcaagttgatttctgccacgttccatacggtgcgagtcatattgaatgcagtttctccgtctcgttttcttctgaactacgtcaaccatataagtgtaactcaagcaaagttaaacaaacgctagtgcaattagtcgagctctacgaaacgaaaatcggctggactgagctagcaacccgatatttgatgaacatttgcaacggtaaatggctgtggaaaaatacccgtaaagcctattgctggaacattgtacttacaccttggccttggaacggggaaaaggttggatttgaagatattcgtactaactacacctcacggcaagactttaaaaataataaaaattggtctgctatagttgaaatgatcaaaaccgcattttctagtactgatgggctggcgatatttgaagtcagggccaccttgcacttgccaacgaatgctatggtgcggccaagccaagttttcacagaaaaagaaagtggcagtaaaagtaaatctaaaactcaaaacagtcgagtttttcagagtacaactattgatggtgaacgatcgccaatactaggggcctttaaaacgggagcagctattgcaaccattgacgactggtatcctgaagccactgagccactaagggtcggacggtttggggttcatcgcgaagatgtcacttgctaccgtcatccgtctaccggaaaagattttttctcgatattacaacaagcagagcactatattgaagtgttgagcgccaacaaaactcccgctcaagaaactatcaacgacatgcactttttaatggctaacctgattaagggtgggatgttccagcataaaggagacgggtccggcgagggtcgtggcagtcttttgacttgcggtgatgtagaagagaaccctggctgaaaggaggtaaataatgaaatggtattataagacaatcacctttctgccagagttgtgcaacaacgagtcactggctgcaaagtgtctccgcgttctgcatggatttaactatcagtatgagacacgaaatatcggcgtttcatttccgctttggtgtgatgcaacggttggaaaaaagatttcatttgtcagcaagaacaagatagaactcgacttactacttaaacaacactatttcgtccaaatggaacaacttcaatactttcatatatccaacactgttctcgtcccagaagattgtacatacgtttcctttagacgctgtcaatctatagataagctcacagcagcagggctggcaaggaaaatcagacgcctggagaaacgtgctctatctagaggcgagcaatttgacccatcatcttttgctcaaaaagagcatactgcaatagcgcactaccactcacttggggagtccagcaaacagacgaaccgcaactttcgactcaatatcaggatgctctcggagcaaccccgtgaggggaactcgatttttagtagctatggcttatcaaattcagaaaactcgtttcagcctgtacccttaatctgacctaggctgctgccaccgctgagcaataactagcataaccccttggggcctctaaacgggtcttgaggggttttttgctgaaacctcaggcatttgagaagcacacggtcacactgcttccggtagtcaataaaccggtaaaccagcaatagacataagcggctatttaacgaccctgccctgaaccgacgaccgggtcatcgtggccggatcttgcggcccctcggcttgaacgaattgttagacattatttgccgactaccttggtgatctcgcctttcacgtagtggacaaattcttccaactgatctgcgcgcgaggccaagcgatcttcttcttgtccaagataagcctgtctagcttcaagtatgacgggctgatactgggccggcaggcgctccattgcccagtcggcagcgacatccttcggcgcgattttgccggttactgcgctgtaccaaatgcgggacaacgtaagcactacatttcgctcatcgccagcccagtcgggcggcgagttccatagcgttaaggtttcatttagcgcctcaaatagatcctgttcaggaaccggatcaaagagttcctccgccgctggacctaccaaggcaacgctatgttctcttgcttttgtcagcaagatagccagatcaatgtcgatcgtggctggctcgaagatacctgcaagaatgtcattgcgctgccattctccaaattgcagttcgcgcttagctggataacgccacggaatgatgtcgtcgtgcacaacaatggtgacttctacagcgcggagaatctcgctctctccaggggaagccgaagtttccaaaaggtcgttgatcaaagctcgccgcgttgtttcatcaagccttacggtcaccgtaaccagcaaatcaatatcactgtgtggcttcaggccgccatccactgcggagccgtacaaatgtacggccagcaacgtcggttcgagatggcgctcgatgacgccaactacctctgatagttgagtcgatacttcggcgatcaccgcttccctcatactcttcctttttcaatattattgaagcatttatcagggttattgtctcatgagcggatacatatttgaatgtatttagaaaaataaacaaatagctagctcactcggtcgctacgctccgggcgtgagactgcggcgggcgctgcggacacatacaaagttacccacagattccgtggataagcaggggactaacatgtgaggcaaaacagcagggccgcgccggtggcgtttttccataggctccgccctcctgccagagttcacataaacagacgcttttccggtgcatctgtgggagccgtgaggctcaaccatgaatctgacagtacgggcgaaacccgacaggacttaaagatccccaccgtttccggcgggtcgctccctcttgcgctctcctgttccgaccctgccgtttaccggatacctgttccgcctttctcccttacgggaagtgtggcgctttctcatagctcacacactggtatctcggctcggtgtaggtcgttcgctccaagctgggctgtaagcaagaactccccgttcagcccgactgctgcgccttatccggtaactgttcacttgagtccaacccggaaaagcacggtaaaacgccactggcagcagccattggtaactgggagttcgcagaggatttgtttagctaaacacgcggttgctcttgaagtgtgcgccaaagtccggctacactggaaggacagatttggttgctgtgctctgcgaaagccagttaccacggttaagcagttccccaactgacttaaccttcgatcaaaccacctccccaggtggttttttcgtttacagggcaaaagattacgcgcagaaaaaaaggatctcaagaagatcctttgatcttttctactgaaccgctctagatttcagtgcaatttatctcttcaaatgtagcacctgaagtcagccccatacgatataagttgtaattctcatgttagtcatgccccgcgcccaccggaaggagctgactgggttgaaggctctcaagggcatcggtcgagatcccggtgcctaatgagtgagctaacttacattaattgcgttgcgctcactgcccgctttccagtcgggaaacctgtcgtgccagctgcattaatgaatcggccaacgcgcggggagaggcggtttgcgtattgggcgccagggtggtttttcttttcaccagtgagacgggcaacagctgattgcccttcaccgcctggccctgagagagttgcagcaagcggtccacgctggtttgccccagcaggcgaaaatcctgtttgatggtggttaacggcgggatataacatgagctgtcttcggtatcgtcgtatcccactaccgagatgtccgcaccaacgcgcagcccggactcggtaatggcgcgcattgcgcccagcgccatctgatcgttggcaaccagcatcgcagtgggaacgatgccctcattcagcatttgcatggtttgttgaaaaccggacatggcactccagtcgccttcccgttccgctatcggctgaatttgattgcgagtgagatatttatgccagccagccagacgcagacgcgccgagacagaacttaatgggcccgctaacagcgcgatttgctggtgacccaatgcgaccagatgctccacgcccagtcgcgtaccgtcttcatgggagaaaataatactgttgatgggtgtctggtcagagacatcaagaaataacgccggaacattagtgcaggcagcttccacagcaatggcatcctggtcatccagcggatagttaatgatcagcccactgacgcgttgcgcgagaagattgtgcaccgccgctttacaggcttcgacgccgcttcgttctaccatcgacaccaccacgctggcacccagttgatcggcgcgagatttaatcgccgcgacaatttgcgacggcgcgtgcagggccagactggaggtggcaacgccaatcagcaacgactgtttgcccgccagttgttgtgccacgcggttgggaatgtaattcagctccgccatcgccgcttccactttttcccgcgttttcgcagaaacgtggctggcctggttcaccacgcgggaaacggtctgataagagacaccggcatactctgcgacatcgtataacgttactggtttcac

SEQ ID NO: 72 - DNA, 8489 bp, synthetic construct
  source 1..8489: mol_type = other DNA
attcaccaccctgaattgactctcttccgggcgctatcatgccataccgcgaaaggttttgcgccattcgatggtgtccgggatctcgacgctctcccttatgcgactcctgcattaggaaattaatacgactcactataggggaattgtgagcggataacaattcccctgtagaaataattttgtttaactttaataaggagatataccatgggtgaactgccgagtaggtagctgataacagtacagcgcggctgaaatcatcattaaagcggtgaactgccgagtaggtagctgataacggatccgaattcgagctcggcgcgcctgcaggtcgacaagcttgcggccgcataatgcttaagtcgaacagaaagtaatcgtattgtacacggccgcataatcgaaattaatacgactcactataggggaattgtgagcggataacaattccccatcttagtatattagttaagtataagaaggagatatacatatgtttttgcaaagacctaaaccttacagcgatgaaagtttagaaagtttctttatccgagtggctaacaaaaatggctacggtgatgtccatcgcttcctagaagccactaaacgattccttcaagacattgaccataatggctatcaaacctttccgactgatataactcggataaacccatactcagctaaaaacagttccagcgcacgaactgcgtcattcctgaaacttgcacaattgacatttaatgaaccgccagagctacttgggttggcaattaacagaacaaacatgaaatactcgccgtcaactagcgcggttgttagaggtgcagaagtctttcctcgcagtttactacggacgcactccatcccctgctgtcctttgtgtctgcgagaaaatggctacgcctcctacctttggcactttcaggggtacgaatactgccacagccataacgtacctttaattaccacttgtagctgtggtaaggagtttgactaccgagtatctgggttaaagggcatttgctgcaaatgcaaggagcctatcaccttaaccagcagggagaacggtcatgaggcagcgtgtactgtttcaaactggcttgctggccatgaatctaaacctctgccaaatcttcctaaaagctaccgatggggtttagttcattggtggatgggtattaaagatagcgagttcgatcacttttcgttcgttcaatttttctcaaactggccaaggtcattccactcgataatcgaagatgaagtagagttcaaccttgagcatgctgttgtcagcacgtctgaattacgactaaaagatcttcttggtcgattgtttttcggttcaattcggttacctgagcggaatcttcaacacaatatcatccttggtgagcttctctgctatttagaaaatcgtttatggcaagacaagggattaatcgccaacctcaaaatgaacgcgttagaggcgactgtaatgttaaattgtagcctcgatcagattgcatcaatggttgaacaacgcatcttgaagccaaatcgaaaaagcaagcccaacagccctcttgatgttaccgattatctatttcatttcggcgatattttctgtctttggttagctgagttccaaagcgatgagtttaaccgttcgttttatgtgtcgaggtggtaaatgcaaactctgaaagaactaatcgcatccaatcctgacgacttaacaactgaacttaagagagcatttcgtccactcacaccgcatattgcaattgatggtaatgaacttgacgcactgacgatattagtcaatttaaccgataagactgatgatcagaaagacctgctcgatcgagccaaatgcaagcaaaaacttcgagatgaaaaatggtgggctagctgcataaattgcgttaattacagacaaagccataacccaaaattcccggatatacgttctgaaggcgtgattcgaacccaagccctgggtgaattaccgagtttcctactctcgtcctcaaaaatcccaccataccattggtcatatagccatgattcaaaatacgtcaacaaaagcgcattcctcaccaatgagttttgttgggatggtgagatctcatgtttgggtgagcttcttaaagatgcagatcacccactttggaatactttgaaaaagttaggttgttctcaaaaaacttgcaaagcaatggcaaaacaactagctgatattactctcacgactatcaatgtcacactcgcaccaaattacctgactcaaatatctctccccgatagtgatacatcctacatttcactctctcctgttgcatcgctatcgatgcaaagccactttcatcagaggctccaagatgaaaatcggcatagcgcgataacgcggtttagccgaactaccaacatgggggtcactgcgatgacatgtggcggcgcatttagaatgttaaagtctggcgctaagttttccagcccccctcatcaccgattaaacagtaaacgaagttggttgacgtcagagcatgttcagtcattaaaacagtaccagcgcctcaacaaaagcctcatacctgaaaactctcggattgcactccgtagaaaatacaaaatcgagcttcaaaatatggtcagatcttggtttgcaatgcaagaccatacccttgattcgaacatacttatccaacatttgaatcatgacctatcttacttaggagccacaaaacgttttgcatacgatccagcgatgaccaagctctttactgagcttttgaaacgagagttatcaaattcaatcaataatggtgagcaacacactaatggatcgtttttagtcctaccgaatatcagggtttgtggcgcaacagctttaagctccccggtaacggtggggattccatcacttacagctttctttggcttcgttcacgcatttgaacggaatataaatcgcaccacctcatcgtttcgtgttgaatcctttgcgatatgcgtccatcaactacatgtcgagaagcgaggtttgacagcagagtttgtggaaaaaggcgacgggactatatccgctcccgcgacccgggatgactggcagtgtgatgtcgtatttagccttattttgaacaccaactttgctcaacatattgaccaagatacgttagttacatcactaccaaagcgattggctcggggttcagcaaaaattgcgattgatgactttaaacatatcaactcattctcgacattagaaacagcgatcgaatctctgccaatagaagctggtaggtggttatcactttacgcacagtcaaacaataatctaagtgatctattagcagccatgacagaggaccatcagctcatggcaagctgcgtcggttaccacttgttagaagagcccaaagataaaccaaactccctcagaggttacaaacacgctatcgccgagtgcatcattggactcattaactcaatcacctttagctcagagactgatcccaacacaatcttttggtcgctaaagaactatcaaaactacctagtggtacagccaaggagtatcaacgatgaaactaccgacaaatctagcctatgagcgctctatcgacccatcagatgtctgtttttttgtcgtctggcccgatgatagaaaaacacctttaacctacaattctcgtactctgctcgggcaaatggaagcggcatcattagcctatgatgtctcaggtcaaccaataaaaagtgccaccgctgaggcgttagctcaagggaaccctcatcaagttgatttctgccacgttccatacggtgcgagtcatattgaatgcagtttctccgtctcgttttcttctgaactacgtcaaccatataagtgtaactcaagcaaagttaaacaaacgctagtgcaattagtcgagctctacgaaacgaaaatcggctggactgagctagcaacccgatatttgatgaacatttgcaacggtaaatggctgtggaaaaatacccgtaaagcctattgctggaacattgtacttacaccttggccttggaacggggaaaaggttggatttgaagatattcgtactaactacacctcacggcaagactttaaaaataataaaaattggtctgctatagttgaaatgatcaaaaccgcattttctagtactgatgggctggcgatatttgaagtcagggccaccttgcacttgccaacgaatgctatggtgcggccaagccaagttttcacagaaaaagaaagtggcagtaaaagtaaatctaaaactcaaaacagtcgagtttttcagagtacaactattgatggtgaacgatcgccaatactaggggcctttaaaacgggagcagctattgcaaccattgacgactggtatcctgaagccactgagccactaagggtcggacggtttggggttcatcgcgaagatgtcacttgctaccgtcatccgtctaccggaaaagattttttctcgatattacaacaagcagagcactatattgaagtgttgagcgccaacaaaactcccgctcaagaaactatcaacgacatgcactttttaatggctaacctgattaagggtgggatgttccagcataaaggagactgaaaggaggtaaataatgcctaagaaaaagcgtaaagttggcaccggtgtgaaatggtattataagacaatcacctttctgccagagttgtgcaacaacgagtcactggctgcaaagtgtctccgcgttctgcatggatttaactatcagtatgagacacgaaatatcggcgtttcatttccgctttggtgtgatgcaacggttggaaaaaagatttcatttgtcagcaagaacaagatagaactcgacttactacttaaacaacactatttcgtccaaatggaacaacttcaatactttcatatatccaacactgttctcgtcccagaagattgtacatacgtttcctttagacgctgtcaatctatagataagctcacagcagcagggctggcaaggaaaatcagacgcctggagaaacgtgctctatctagaggcgagcaatttgacccatcatcttttgctcaaaaagagcatactgcaatagcgcactaccactcacttggggagtccagcaaacagacgaaccgcaactttcgactcaatatcaggatgctctcggagcaaccccgtgaggggaactcgatttttagtagctatggcttatcaaattcagaaaactcgtttcagcctgtacccttaatctgacctaggctgctgccaccgctgagcaataactagcataaccccttggggcctctaaacgggtcttgaggggttttttgctgaaacctcaggcatttgagaagcacacggtcacactgcttccggtagtcaataaaccggtaaaccagcaatagacataagcggctatttaacgaccctgccctgaaccgacgaccgggtcatcgtggccggatcttgcggcccctcggcttgaacgaattgttagacattatttgccgactaccttggtgatctcgcctttcacgtagtggacaaattcttccaactgatctgcgcgcgaggccaagcgatcttcttcttgtccaagataagcctgtctagcttcaagtatgacgggctgatactgggccggcaggcgctccattgcccagtcggcagcgacatccttcggcgcgattttgccggttactgcgctgtaccaaatgcgggacaacgtaagcactacatttcgctcatcgccagcccagtcgggcggcgagttccatagcgttaaggtttcatttagcgcctcaaatagatcctgttcaggaaccggatcaaagagttcctccgccgctggacctaccaaggcaacgctatgttctcttgcttttgtcagcaagatagccagatcaatgtcgatcgtggctggctcgaagatacctgcaagaatgtcattgcgctgccattctccaaattgcagttcgcgcttagctggataacgccacggaatgatgtcgtcgtgcacaacaatggtgacttctacagcgcggagaatctcgctctctccaggggaagccgaagtttccaaaaggtcgttgatcaaagctcgccgcgttgtttcatcaagccttacggtcaccgtaaccagcaaatcaatatcactgtgtggcttcaggccgccatccactgcggagccgtacaaatgtacggccagcaacgtcggttcgagatggcgctcgatgacgccaactacctctgatagttgagtcgatacttcggcgatcaccgcttccctcatactcttcctttttcaatattattgaagcatttatcagggttattgtctcatgagcggatacatatttgaatgtatttagaaaaataaacaaatagctagctcactcggtcgctacgctccgggcgtgagactgcggcgggcgctgcggacacatacaaagttacccacagattccgtggataagcaggggactaacatgtgaggcaaaacagcagggccgcgccggtggcgtttttccataggctccgccctcctgccagagttcacataaacagacgcttttccggtgcatctgtgggagccgtgaggctcaaccatgaatctgacagtacgggcgaaacccgacaggacttaaagatccccaccgtttccggcgggtcgctccctcttgcgctctcctgttccgaccctgccgtttaccggatacctgttccgcctttctcccttacgggaagtgtggcgctttctcatagctcacacactggtatctcggctcggtgtaggtcgttcgctccaagctgggctgtaagcaagaactccccgttcagcccgactgctgcgccttatccggtaactgttcacttgagtccaacccggaaaagcacggtaaaacgccactggcagcagccattggtaactgggagttcgcagaggatttgtttagctaaacacgcggttgctcttgaagtgtgcgccaaagtccggctacactggaaggacagatttggttgctgtgctctgcgaaagccagttaccacggttaagcagttccccaactgacttaaccttcgatcaaaccacctccccaggtggttttttcgtttacagggcaaaagattacgcgcagaaaaaaaggatctcaagaagatcctttgatcttttctactgaaccgctctagatttcagtgcaatttatctcttcaaatgtagcacctgaagtcagccccatacgatataagttgtaattctcatgttagtcatgccccgcgcccaccggaaggagctgactgggttgaaggctctcaagggcatcggtcgagatcccggtgcctaatgagtgagctaacttacattaattgcgttgcgctcactgcccgctttccagtcgggaaacctgtcgtgccagctgcattaatgaatcggccaacgcgcggggagaggcggtttgcgtattgggcgccagggtggtttttcttttcaccagtgagacgggcaacagctgattgcccttcaccgcctggccctgagagagttgcagcaagcggtccacgctggtttgccccagcaggcgaaaatcctgtttgatggtggttaacggcgggatataacatgagctgtcttcggtatcgtcgtatcccactaccgagatgtccgcaccaacgcgcagcccggactcggtaatggcgcgcattgcgcccagcgccatctgatcgttggcaaccagcatcgcagtgggaacgatgccctcattcagcatttgcatggtttgttgaaaaccggacatggcactccagtcgccttcccgttccgctatcggctgaatttgattgcgagtgagatatttatgccagccagccagacgcagacgcgccgagacagaacttaatgggcccgctaacagcgcgatttgctggtgacccaatgcgaccagatgctccacgcccagtcgcgtaccgtcttcatgggagaaaataatactgttgatgggtgtctggtcagagacatcaagaaataacgccggaacattagtgcaggcagcttccacagcaatggcatcctggtcatccagcggatagttaatgatcagcccactgacgcgttgcgcgagaagattgtgcaccgccgctttacaggcttcgacgccgcttcgttctaccatcgacaccaccacgctggcacccagttgatcggcgcgagatttaatcgccgcgacaatttgcgacggcgcgtgcagggccagactggaggtggcaacgccaatcagcaacgactgtttgcccgccagttgttgtgccacgcggttgggaatgtaattcagctccgccatcgccgcttccactttttcccgcgttttcgcagaaacgtggctggcctggttcaccacgcgggaaacggtctgataagagacaccggcatactctgcgacatcgtataacgttactggtttcac

SEQ ID NO: 73 - DNA, 8505 bp, synthetic construct
  source 1..8505: mol_type = other DNA
attcaccaccctgaattgactctcttccgggcgctatcatgccataccgcgaaaggttttgcgccattcgatggtgtccgggatctcgacgctctcccttatgcgactcctgcattaggaaattaatacgactcactataggggaattgtgagcggataacaattcccctgtagaaataattttgtttaactttaataaggagatataccatgggtgaactgccgagtaggtagctgataacagtacagcgcggctgaaatcatcattaaagcggtgaactgccgagtaggtagctgataacggatccgaattcgagctcggcgcgcctgcaggtcgacaagcttgcggccgcataatgcttaagtcgaacagaaagtaatcgtattgtacacggccgcataatcgaaattaatacgactcactataggggaattgtgagcggataacaattccccatcttagtatattagttaagtataagaaggagatatacatatgtttttgcaaagacctaaaccttacagcgatgaaagtttagaaagtttctttatccgagtggctaacaaaaatggctacggtgatgtccatcgcttcctagaagccactaaacgattccttcaagacattgaccataatggctatcaaacctttccgactgatataactcggataaacccatactcagctaaaaacagttccagcgcacgaactgcgtcattcctgaaacttgcacaattgacatttaatgaaccgccagagctacttgggttggcaattaacagaacaaacatgaaatactcgccgtcaactagcgcggttgttagaggtgcagaagtctttcctcgcagtttactacggacgcactccatcccctgctgtcctttgtgtctgcgagaaaatggctacgcctcctacctttggcactttcaggggtacgaatactgccacagccataacgtacctttaattaccacttgtagctgtggtaaggagtttgactaccgagtatctgggttaaagggcatttgctgcaaatgcaaggagcctatcaccttaaccagcagggagaacggtcatgaggcagcgtgtactgtttcaaactggcttgctggccatgaatctaaacctctgccaaatcttcctaaaagctaccgatggggtttagttcattggtggatgggtattaaagatagcgagttcgatcacttttcgttcgttcaatttttctcaaactggccaaggtcattccactcgataatcgaagatgaagtagagttcaaccttgagcatgctgttgtcagcacgtctgaattacgactaaaagatcttcttggtcgattgtttttcggttcaattcggttacctgagcggaatcttcaacacaatatcatccttggtgagcttctctgctatttagaaaatcgtttatggcaagacaagggattaatcgccaacctcaaaatgaacgcgttagaggcgactgtaatgttaaattgtagcctcgatcagattgcatcaatggttgaacaacgcatcttgaagccaaatcgaaaaagcaagcccaacagccctcttgatgttaccgattatctatttcatttcggcgatattttctgtctttggttagctgagttccaaagcgatgagtttaaccgttcgttttatgtgtcgaggtggtaaatgcaaactctgaaagaactaatcgcatccaatcctgacgacttaacaactgaacttaagagagcatttcgtccactcacaccgcatattgcaattgatggtaatgaacttgacgcactgacgatattagtcaatttaaccgataagactgatgatcagaaagacctgctcgatcgagccaaatgcaagcaaaaacttcgagatgaaaaatggtgggctagctgcataaattgcgttaattacagacaaagccataacccaaaattcccggatatacgttctgaaggcgtgattcgaacccaagccctgggtgaattaccgagtttcctactctcgtcctcaaaaatcccaccataccattggtcatatagccatgattcaaaatacgtcaacaaaagcgcattcctcaccaatgagttttgttgggatggtgagatctcatgtttgggtgagcttcttaaagatgcagatcacccactttggaatactttgaaaaagttaggttgttctcaaaaaacttgcaaagcaatggcaaaacaactagctgatattactctcacgactatcaatgtcacactcgcaccaaattacctgactcaaatatctctccccgatagtgatacatcctacatttcactctctcctgttgcatcgctatcgatgcaaagccactttcatcagaggctccaagatgaaaatcggcatagcgcgataacgcggtttagccgaactaccaacatgggggtcactgcgatgacatgtggcggcgcatttagaatgttaaagtctggcgctaagttttccagcccccctcatcaccgattaaacagtaaacgaagttggttgacgtcagagcatgttcagtcattaaaacagtaccagcgcctcaacaaaagcctcatacctgaaaactctcggattgcactccgtagaaaatacaaaatcgagcttcaaaatatggtcagatcttggtttgcaatgcaagaccatacccttgattcgaacatacttatccaacatttgaatcatgacctatcttacttaggagccacaaaacgttttgcatacgatccagcgatgaccaagctctttactgagcttttgaaacgagagttatcaaattcaatcaataatggtgagcaacacactaatggatcgtttttagtcctaccgaatatcagggtttgtggcgcaacagctttaagctccccggtaacggtggggattccatcacttacagctttctttggcttcgttcacgcatttgaacggaatataaatcgcaccacctcatcgtttcgtgttgaatcctttgcgatatgcgtccatcaactacatgtcgagaagcgaggtttgacagcagagtttgtggaaaaaggcgacgggactatatccgctcccgcgacccgggatgactggcagtgtgatgtcgtatttagccttattttgaacaccaactttgctcaacatattgaccaagatacgttagttacatcactaccaaagcgattggctcggggttcagcaaaaattgcgattgatgactttaaacatatcaactcattctcgacattagaaacagcgatcgaatctctgccaatagaagctggtaggtggttatcactttacgcacagtcaaacaataatctaagtgatctattagcagccatgacagaggaccatcagctcatggcaagctgcgtcggttaccacttgttagaagagcccaaagataaaccaaactccctcagaggttacaaacacgctatcgccgagtgcatcattggactcattaactcaatcacctttagctcagagactgatcccaacacaatcttttggtcgctaaagaactatcaaaactacctagtggtacagccaaggagtatcaacgatgaaactaccgacaaatctagcctatgagcgctctatcgacccatcagatgtctgtttttttgtcgtctggcccgatgatagaaaaacacctttaacctacaattctcgtactctgctcgggcaaatggaagcggcatcattagcctatgatgtctcaggtcaaccaataaaaagtgccaccgctgaggcgttagctcaagggaaccctcatcaagttgatttctgccacgttccatacggtgcgagtcatattgaatgcagtttctccgtctcgttttcttctgaactacgtcaaccatataagtgtaactcaagcaaagttaaacaaacgctagtgcaattagtcgagctctacgaaacgaaaatcggctggactgagctagcaacccgatatttgatgaacatttgcaacggtaaatggctgtggaaaaatacccgtaaagcctattgctggaacattgtacttacaccttggccttggaacggggaaaaggttggatttgaagatattcgtactaactacacctcacggcaagactttaaaaataataaaaattggtctgctatagttgaaatgatcaaaaccgcattttctagtactgatgggctggcgatatttgaagtcagggccaccttgcacttgccaacgaatgctatggtgcggccaagccaagttttcacagaaaaagaaagtggcagtaaaagtaaatctaaaactcaaaacagtcgagtttttcagagtacaactattgatggtgaacgatcgccaatactaggggcctttaaaacgggagcagctattgcaaccattgacgactggtatcctgaagccactgagccactaagggtcggacggtttggggttcatcgcgaagatgtcacttgctaccgtcatccgtctaccggaaaagattttttctcgatattacaacaagcagagcactatattgaagtgttgagcgccaacaaaactcccgctcaagaaactatcaacgacatgcactttttaatggctaacctgattaagggtgggatgttccagcataaaggagactgactgtgaaatggtattataagacaatcacctttctgccagagttgtgcaacaacgagtcactggctgcaaagtgtctccgcgttctgcatggatttaactatcagtatgagacacgaaatatcggcgtttcatttccgctttggtgtgatgcaacggttggaaaaaagatttcatttgtcagcaagaacaagatagaactcgacttactacttaaacaacactatttcgtccaaatggaacaacttcaatactttcatatatccaacactgttctcgtcccagaagattgtacatacgtttcctttagacgctgtcaatctatagataagctcacagcagcagggctggcaaggaaaatcagacgcctggagaaacgtgctctatctagaggcgagcaatttgacccatcatcttttgctcaaaaagagcatactgcaatagcgcactaccactcacttggggagtccagcaaacagacgaaccgcaactttcgactcaatatcaggatgctctcggagcaaccccgtgaggggaactcgatttttagtagctatggcttatcaaattcagaaaactcgtttcagcctgtacccttaatcgggaaccaggagggtcgtggcagtcttttgacttgcggtgatgtagaagagaaccctggctgacctaggctgctgccaccgctgagcaataactagcataaccccttggggcctctaaacgggtcttgaggggttttttgctgaaacctcaggcatttgagaagcacacggtcacactgcttccggtagtcaataaaccggtaaaccagcaatagacataagcggctatttaacgaccctgccctgaaccgacgaccgggtcatcgtggccggatcttgcggcccctcggcttgaacgaattgttagacattatttgccgactaccttggtgatctcgcctttcacgtagtggacaaattcttccaactgatctgcgcgcgaggccaagcgatcttcttcttgtccaagataagcctgtctagcttcaagtatgacgggctgatactgggccggcaggcgctccattgcccagtcggcagcgacatccttcggcgcgattttgccggttactgcgctgtaccaaatgcgggacaacgtaagcactacatttcgctcatcgccagcccagtcgggcggcgagttccatagcgttaaggtttcatttagcgcctcaaatagatcctgttcaggaaccggatcaaagagttcctccgccgctggacctaccaaggcaacgctatgttctcttgcttttgtcagcaagatagccagatcaatgtcgatcgtggctggctcgaagatacctgcaagaatgtcattgcgctgccattctccaaattgcagttcgcgcttagctggataacgccacggaatgatgtcgtcgtgcacaacaatggtgacttctacagcgcggagaatctcgctctctccaggggaagccgaagtttccaaaaggtcgttgatcaaagctcgccgcgttgtttcatcaagccttacggtcaccgtaaccagcaaatcaatatcactgtgtggcttcaggccgccatccactgcggagccgtacaaatgtacggccagcaacgtcggttcgagatggcgctcgatgacgccaactacctctgatagttgagtcgatacttcggcgatcaccgcttccctcatactcttcctttttcaatattattgaagcatttatcagggttattgtctcatgagcggatacatatttgaatgtatttagaaaaataaacaaatagctagctcactcggtcgctacgctccgggcgtgagactgcggcgggcgctgcggacacatacaaagttacccacagattccgtggataagcaggggactaacatgtgaggcaaaacagcagggccgcgccggtggcgtttttccataggctccgccctcctgccagagttcacataaacagacgcttttccggtgcatctgtgggagccgtgaggctcaaccatgaatctgacagtacgggcgaaacccgacaggacttaaagatccccaccgtttccggcgggtcgctccctcttgcgctctcctgttccgaccctgccgtttaccggatacctgttccgcctttctcccttacgggaagtgtggcgctttctcatagctcacacactggtatctcggctcggtgtaggtcgttcgctccaagctgggctgtaagcaagaactccccgttcagcccgactgctgcgccttatccggtaactgttcacttgagtccaacccggaaaagcacggtaaaacgccactggcagcagccattggtaactgggagttcgcagaggatttgtttagctaaacacgcggttgctcttgaagtgtgcgccaaagtccggctacactggaaggacagatttggttgctgtgctctgcgaaagccagttaccacggttaagcagttccccaactgacttaaccttcgatcaaaccacctccccaggtggttttttcgtttacagggcaaaagattacgcgcagaaaaaaaggatctcaagaagatcctttgatcttttctactgaaccgctctagatttcagtgcaatttatctcttcaaatgtagcacctgaagtcagccccatacgatataagttgtaattctcatgttagtcatgccccgcgcccaccggaaggagctgactgggttgaaggctctcaagggcatcggtcgagatcccggtgcctaatgagtgagctaacttacattaattgcgttgcgctcactgcccgctttccagtcgggaaacctgtcgtgccagctgcattaatgaatcggccaacgcgcggggagaggcggtttgcgtattgggcgccagggtggtttttcttttcaccagtgagacgggcaacagctgattgcccttcaccgcctggccctgagagagttgcagcaagcggtccacgctggtttgccccagcaggcgaaaatcctgtttgatggtggttaacggcgggatataacatgagctgtcttcggtatcgtcgtatcccactaccgagatgtccgcaccaacgcgcagcccggactcggtaatggcgcgcattgcgcccagcgccatctgatcgttggcaaccagcatcgcagtgggaacgatgccctcattcagcatttgcatggtttgttgaaaaccggacatggcactccagtcgccttcccgttccgctatcggctgaatttgattgcgagtgagatatttatgccagccagccagacgcagacgcgccgagacagaacttaatgggcccgctaacagcgcgatttgctggtgacccaatgcgaccagatgctccacgcccagtcgcgtaccgtcttcatgggagaaaataatactgttgatgggtgtctggtcagagacatcaagaaataacgccggaacattagtgcaggcagcttccacagcaatggcatcctggtcatccagcggatagttaatgatcagcccactgacgcgttgcgcgagaagattgtgcaccgccgctttacaggcttcgacgccgcttcgttctaccatcgacaccaccacgctggcacccagttgatcggcgcgagatttaatcgccgcgacaatttgcgacggcgcgtgcagggccagactggaggtggcaacgccaatcagcaacgactgtttgcccgccagttgttgtgccacgcggttgggaatgtaattcagctccgccatcgccgcttccactttttcccgcgttttcgcagaaacgtggctggcctggttcaccacgcgggaaacggtctgataagagacaccggcatactctgcgacatcgtataacgttactggtttcac

SEQ ID NO: 74 - DNA, 8478 bp, synthetic construct
  source 1..8478: mol_type = other DNA
attcaccaccctgaattgactctcttccgggcgctatcatgccataccgcgaaaggttttgcgccattcgatggtgtccgggatctcgacgctctcccttatgcgactcctgcattaggaaattaatacgactcactataggggaattgtgagcggataacaattcccctgtagaaataattttgtttaactttaataaggagatataccatgggtgaactgccgagtaggtagctgataacagtacagcgcggctgaaatcatcattaaagcggtgaactgccgagtaggtagctgataacggatccgaattcgagctcggcgcgcctgcaggtcgacaagcttgcggccgcataatgcttaagtcgaacagaaagtaatcgtattgtacacggccgcataatcgaaattaatacgactcactataggggaattgtgagcggataacaattccccatcttagtatattagttaagtataagaaggagatatacatatgcctaagaaaaagcgtaaagttggttctggtatgtttttgcaaagacctaaaccttacagcgatgaaagtttagaaagtttctttatccgagtggctaacaaaaatggctacggtgatgtccatcgcttcctagaagccactaaacgattccttcaagacattgaccataatggctatcaaacctttccgactgatataactcggataaacccatactcagctaaaaacagttccagcgcacgaactgcgtcattcctgaaacttgcacaattgacatttaatgaaccgccagagctacttgggttggcaattaacagaacaaacatgaaatactcgccgtcaactagcgcggttgttagaggtgcagaagtctttcctcgcagtttactacggacgcactccatcccctgctgtcctttgtgtctgcgagaaaatggctacgcctcctacctttggcactttcaggggtacgaatactgccacagccataacgtacctttaattaccacttgtagctgtggtaaggagtttgactaccgagtatctgggttaaagggcatttgctgcaaatgcaaggagcctatcaccttaaccagcagggagaacggtcatgaggcagcgtgtactgtttcaaactggcttgctggccatgaatctaaacctctgccaaatcttcctaaaagctaccgatggggtttagttcattggtggatgggtattaaagatagcgagttcgatcacttttcgttcgttcaatttttctcaaactggccaaggtcattccactcgataatcgaagatgaagtagagttcaaccttgagcatgctgttgtcagcacgtctgaattacgactaaaagatcttcttggtcgattgtttttcggttcaattcggttacctgagcggaatcttcaacacaatatcatccttggtgagcttctctgctatttagaaaatcgtttatggcaagacaagggattaatcgccaacctcaaaatgaacgcgttagaggcgactgtaatgttaaattgtagcctcgatcagattgcatcaatggttgaacaacgcatcttgaagccaaatcgaaaaagcaagcccaacagccctcttgatgttaccgattatctatttcatttcggcgatattttctgtctttggttagctgagttccaaagcgatgagtttaaccgttcgttttatgtgtcgaggtggtaaatgcaaactctgaaagaactaatcgcatccaatcctgacgacttaacaactgaacttaagagagcatttcgtccactcacaccgcatattgcaattgatggtaatgaacttgacgcactgacgatattagtcaatttaaccgataagactgatgatcagaaagacctgctcgatcgagccaaatgcaagcaaaaacttcgagatgaaaaatggtgggctagctgcataaattgcgttaattacagacaaagccataacccaaaattcccggatatacgttctgaaggcgtgattcgaacccaagccctgggtgaattaccgagtttcctactctcgtcctcaaaaatcccaccataccattggtcatatagccatgattcaaaatacgtcaacaaaagcgcattcctcaccaatgagttttgttgggatggtgagatctcatgtttgggtgagcttcttaaagatgcagatcacccactttggaatactttgaaaaagttaggttgttctcaaaaaacttgcaaagcaatggcaaaacaactagctgatattactctcacgactatcaatgtcacactcgcaccaaattacctgactcaaatatctctccccgatagtgatacatcctacatttcactctctcctgttgcatcgctatcgatgcaaagccactttcatcagaggctccaagatgaaaatcggcatagcgcgataacgcggtttagccgaactaccaacatgggggtcactgcgatgacatgtggcggcgcatttagaatgttaaagtctggcgctaagttttccagcccccctcatcaccgattaaacagtaaacgaagttggttgacgtcagagcatgttcagtcattaaaacagtaccagcgcctcaacaaaagcctcatacctgaaaactctcggattgcactccgtagaaaatacaaaatcgagcttcaaaatatggtcagatcttggtttgcaatgcaagaccatacccttgattcgaacatacttatccaacatttgaatcatgacctatcttacttaggagccacaaaacgttttgcatacgatccagcgatgaccaagctctttactgagcttttgaaacgagagttatcaaattcaatcaataatggtgagcaacacactaatggatcgtttttagtcctaccgaatatcagggtttgtggcgcaacagctttaagctccccggtaacggtggggattccatcacttacagctttctttggcttcgttcacgcatttgaacggaatataaatcgcaccacctcatcgtttcgtgttgaatcctttgcgatatgcgtccatcaactacatgtcgagaagcgaggtttgacagcagagtttgtggaaaaaggcgacgggactatatccgctcccgcgacccgggatgactggcagtgtgatgtcgtatttagccttattttgaacaccaactttgctcaacatattgaccaagatacgttagttacatcactaccaaagcgattggctcggggttcagcaaaaattgcgattgatgactttaaacatatcaactcattctcgacattagaaacagcgatcgaatctctgccaatagaagctggtaggtggttatcactttacgcacagtcaaacaataatctaagtgatctattagcagccatgacagaggaccatcagctcatggcaagctgcgtcggttaccacttgttagaagagcccaaagataaaccaaactccctcagaggttacaaacacgctatcgccgagtgcatcattggactcattaactcaatcacctttagctcagagactgatcccaacacaatcttttggtcgctaaagaactatcaaaactacctagtggtacagccaaggagtatcaacgatgaaactaccgacaaatctagcctatgagcgctctatcgacccatcagatgtctgtttttttgtcgtctggcccgatgatagaaaaacacctttaacctacaattctcgtactctgctcgggcaaatggaagcggcatcattagcctatgatgtctcaggtcaaccaataaaaagtgccaccgctgaggcgttagctcaagggaaccctcatcaagttgatttctgccacgttccatacggtgcgagtcatattgaatgcagtttctccgtctcgttttcttctgaactacgtcaaccatataagtgtaactcaagcaaagttaaacaaacgctagtgcaattagtcgagctctacgaaacgaaaatcggctggactgagctagcaacccgatatttgatgaacatttgcaacggtaaatggctgtggaaaaatacccgtaaagcctattgctggaacattgtacttacaccttggccttggaacggggaaaaggttggatttgaagatattcgtactaactacacctcacggcaagactttaaaaataataaaaattggtctgctatagttgaaatgatcaaaaccgcattttctagtactgatgggctggcgatatttgaagtcagggccaccttgcacttgccaacgaatgctatggtgcggccaagccaagttttcacagaaaaagaaagtggcagtaaaagtaaatctaaaactcaaaacagtcgagtttttcagagtacaactattgatggtgaacgatcgccaatactaggggcctttaaaacgggagcagctattgcaaccattgacgactggtatcctgaagccactgagccactaagggtcggacggtttggggttcatcgcgaagatgtcacttgctaccgtcatccgtctaccggaaaagattttttctcgatattacaacaagcagagcactatattgaagtgttgagcgccaacaaaactcccgctcaagaaactatcaacgacatgcactttttaatggctaacctgattaagggtgggatgttccagcataaaggagactgactgtgaaatggtattataagacaatcacctttctgccagagttgtgcaacaacgagtcactggctgcaaagtgtctccgcgttctgcatggatttaactatcagtatgagacacgaaatatcggcgtttcatttccgctttggtgtgatgcaacggttggaaaaaagatttcatttgtcagcaagaacaagatagaactcgacttactacttaaacaacactatttcgtccaaatggaacaacttcaatactttcatatatccaacactgttctcgtcccagaagattgtacatacgtttcctttagacgctgtcaatctatagataagctcacagcagcagggctggcaaggaaaatcagacgcctggagaaacgtgctctatctagaggcgagcaatttgacccatcatcttttgctcaaaaagagcatactgcaatagcgcactaccactcacttggggagtccagcaaacagacgaaccgcaactttcgactcaatatcaggatgctctcggagcaaccccgtgaggggaactcgatttttagtagctatggcttatcaaattcagaaaactcgtttcagcctgtacccttaatctgacctaggctgctgccaccgctgagcaataactagcataaccccttggggcctctaaacgggtcttgaggggttttttgctgaaacctcaggcatttgagaagcacacggtcacactgcttccggtagtcaataaaccggtaaaccagcaatagacataagcggctatttaacgaccctgccctgaaccgacgaccgggtcatcgtggccggatcttgcggcccctcggcttgaacgaattgttagacattatttgccgactaccttggtgatctcgcctttcacgtagtggacaaattcttccaactgatctgcgcgcgaggccaagcgatcttcttcttgtccaagataagcctgtctagcttcaagtatgacgggctgatactgggccggcaggcgctccattgcccagtcggcagcgacatccttcggcgcgattttgccggttactgcgctgtaccaaatgcgggacaacgtaagcactacatttcgctcatcgccagcccagtcgggcggcgagttccatagcgttaaggtttcatttagcgcctcaaatagatcctgttcaggaaccggatcaaagagttcctccgccgctggacctaccaaggcaacgctatgttctcttgcttttgtcagcaagatagccagatcaatgtcgatcgtggctggctcgaagatacctgcaagaatgtcattgcgctgccattctccaaattgcagttcgcgcttagctggataacgccacggaatgatgtcgtcgtgcacaacaatggtgacttctacagcgcggagaatctcgctctctccaggggaagccgaagtttccaaaaggtcgttgatcaaagctcgccgcgttgtttcatcaagccttacggtcaccgtaaccagcaaatcaatatcactgtgtggcttcaggccgccatccactgcggagccgtacaaatgtacggccagcaacgtcggttcgagatggcgctcgatgacgccaactacctctgatagttgagtcgatacttcggcgatcaccgcttccctcatactcttcctttttcaatattattgaagcatttatcagggttattgtctcatgagcggatacatatttgaatgtatttagaaaaataaacaaatagctagctcactcggtcgctacgctccgggcgtgagactgcggcgggcgctgcggacacatacaaagttacccacagattccgtggataagcaggggactaacatgtgaggcaaaacagcagggccgcgccggtggcgtttttccataggctccgccctcctgccagagttcacataaacagacgcttttccggtgcatctgtgggagccgtgaggctcaaccatgaatctgacagtacgggcgaaacccgacaggacttaaagatccccaccgtttccggcgggtcgctccctcttgcgctctcctgttccgaccctgccgtttaccggatacctgttccgcctttctcccttacgggaagtgtggcgctttctcatagctcacacactggtatctcggctcggtgtaggtcgttcgctccaagctgggctgtaagcaagaactccccgttcagcccgactgctgcgccttatccggtaactgttcacttgagtccaacccggaaaagcacggtaaaacgccactggcagcagccattggtaactgggagttcgcagaggatttgtttagctaaacacgcggttgctcttgaagtgtgcgccaaagtccggctacactggaaggacagatttggttgctgtgctctgcgaaagccagttaccacggttaagcagttccccaactgacttaaccttcgatcaaaccacctccccaggtggttttttcgtttacagggcaaaagattacgcgcagaaaaaaaggatctcaagaagatcctttgatcttttctactgaaccgctctagatttcagtgcaatttatctcttcaaatgtagcacctgaagtcagccccatacgatataagttgtaattctcatgttagtcatgccccgcgcccaccggaaggagctgactgggttgaaggctctcaagggcatcggtcgagatcccggtgcctaatgagtgagctaacttacattaattgcgttgcgctcactgcccgctttccagtcgggaaacctgtcgtgccagctgcattaatgaatcggccaacgcgcggggagaggcggtttgcgtattgggcgccagggtggtttttcttttcaccagtgagacgggcaacagctgattgcccttcaccgcctggccctgagagagttgcagcaagcggtccacgctggtttgccccagcaggcgaaaatcctgtttgatggtggttaacggcgggatataacatgagctgtcttcggtatcgtcgtatcccactaccgagatgtccgcaccaacgcgcagcccggactcggtaatggcgcgcattgcgcccagcgccatctgatcgttggcaaccagcatcgcagtgggaacgatgccctcattcagcatttgcatggtttgttgaaaaccggacatggcactccagtcgccttcccgttccgctatcggctgaatttgattgcgagtgagatatttatgccagccagccagacgcagacgcgccgagacagaacttaatgggcccgctaacagcgcgatttgctggtgacccaatgcgaccagatgctccacgcccagtcgcgtaccgtcttcatgggagaaaataatactgttgatgggtgtctggtcagagacatcaagaaataacgccggaacattagtgcaggcagcttccacagcaatggcatcctggtcatccagcggatagttaatgatcagcccactgacgcgttgcgcgagaagattgtgcaccgccgctttacaggcttcgacgccgcttcgttctaccatcgacaccaccacgctggcacccagttgatcggcgcgagatttaatcgccgcgacaatttgcgacggcgcgtgcagggccagactggaggtggcaacgccaatcagcaacgactgtttgcccgccagttgttgtgccacgcggttgggaatgtaattcagctccgccatcgccgcttccactttttcccgcgttttcgcagaaacgtggctggcctggttcaccacgcgggaaacggtctgataagagacaccggcatactctgcgacatcgtataacgttactggtttcac

SEQ ID NO: 75 - DNA, 8518 bp, synthetic construct
  source 1..8518: mol_type = other DNA
attcaccaccctgaattgactctcttccgggcgctatcatgccataccgcgaaaggttttgcgccattcgatggtgtccgggatctcgacgctctcccttatgcgactcctgcattaggaaattaatacgactcactataggggaattgtgagcggataacaattcccctgtagaaataattttgtttaactttaataaggagatataccatgggtgaactgccgagtaggtagctgataacagtacagcgcggctgaaatcatcattaaagcggtgaactgccgagtaggtagctgataacggatccgaattcgagctcggcgcgcctgcaggtcgacaagcttgcggccgcataatgcttaagtcgaacagaaagtaatcgtattgtacacggccgcataatcgaaattaatacgactcactataggggaattgtgagcggataacaattccccatcttagtatattagttaagtataagaaggagatatacatatgtttttgcaaagacctaaaccttacagcgatgaaagtttagaaagtttctttatccgagtggctaacaaaaatggctacggtgatgtccatcgcttcctagaagccactaaacgattccttcaagacattgaccataatggctatcaaacctttccgactgatataactcggataaacccatactcagctaaaaacagttccagcgcacgaactgcgtcattcctgaaacttgcacaattgacatttaatgaaccgccagagctacttgggttggcaattaacagaacaaacatgaaatactcgccgtcaactagcgcggttgttagaggtgcagaagtctttcctcgcagtttactacggacgcactccatcccctgctgtcctttgtgtctgcgagaaaatggctacgcctcctacctttggcactttcaggggtacgaatactgccacagccataacgtacctttaattaccacttgtagctgtggtaaggagtttgactaccgagtatctgggttaaagggcatttgctgcaaatgcaaggagcctatcaccttaaccagcagggagaacggtcatgaggcagcgtgtactgtttcaaactggcttgctggccatgaatctaaacctctgccaaatcttcctaaaagctaccgatggggtttagttcattggtggatgggtattaaagatagcgagttcgatcacttttcgttcgttcaatttttctcaaactggccaaggtcattccactcgataatcgaagatgaagtagagttcaaccttgagcatgctgttgtcagcacgtctgaattacgactaaaagatcttcttggtcgattgtttttcggttcaattcggttacctgagcggaatcttcaacacaatatcatccttggtgagcttctctgctatttagaaaatcgtttatggcaagacaagggattaatcgccaacctcaaaatgaacgcgttagaggcgactgtaatgttaaattgtagcctcgatcagattgcatcaatggttgaacaacgcatcttgaagccaaatcgaaaaagcaagcccaacagccctcttgatgttaccgattatctatttcatttcggcgatattttctgtctttggttagctgagttccaaagcgatgagtttaaccgttcgttttatgtgtcgaggtgggggtcctcggagggtcgtggcagtcttttgacttgcggtgatgtagaagagaaccctggctaaaaggaggtaaataatgcaaactctgaaagaactaatcgcatccaatcctgacgacttaacaactgaacttaagagagcatttcgtccactcacaccgcatattgcaattgatggtaatgaacttgacgcactgacgatattagtcaatttaaccgataagactgatgatcagaaagacctgctcgatcgagccaaatgcaagcaaaaacttcgagatgaaaaatggtgggctagctgcataaattgcgttaattacagacaaagccataacccaaaattcccggatatacgttctgaaggcgtgattcgaacccaagccctgggtgaattaccgagtttcctactctcgtcctcaaaaatcccaccataccattggtcatatagccatgattcaaaatacgtcaacaaaagcgcattcctcaccaatgagttttgttgggatggtgagatctcatgtttgggtgagcttcttaaagatgcagatcacccactttggaatactttgaaaaagttaggttgttctcaaaaaacttgcaaagcaatggcaaaacaactagctgatattactctcacgactatcaatgtcacactcgcaccaaattacctgactcaaatatctctccccgatagtgatacatcctacatttcactctctcctgttgcatcgctatcgatgcaaagccactttcatcagaggctccaagatgaaaatcggcatagcgcgataacgcggtttagccgaactaccaacatgggggtcactgcgatgacatgtggcggcgcatttagaatgttaaagtctggcgctaagttttccagcccccctcatcaccgattaaacagtaaacgaagttggttgacgtcagagcatgttcagtcattaaaacagtaccagcgcctcaacaaaagcctcatacctgaaaactctcggattgcactccgtagaaaatacaaaatcgagcttcaaaatatggtcagatcttggtttgcaatgcaagaccatacccttgattcgaacatacttatccaacatttgaatcatgacctatcttacttaggagccacaaaacgttttgcatacgatccagcgatgaccaagctctttactgagcttttgaaacgagagttatcaaattcaatcaataatggtgagcaacacactaatggatcgtttttagtcctaccgaatatcagggtttgtggcgcaacagctttaagctccccggtaacggtggggattccatcacttacagctttctttggcttcgttcacgcatttgaacggaatataaatcgcaccacctcatcgtttcgtgttgaatcctttgcgatatgcgtccatcaactacatgtcgagaagcgaggtttgacagcagagtttgtggaaaaaggcgacgggactatatccgctcccgcgacccgggatgactggcagtgtgatgtcgtatttagccttattttgaacaccaactttgctcaacatattgaccaagatacgttagttacatcactaccaaagcgattggctcggggttcagcaaaaattgcgattgatgactttaaacatatcaactcattctcgacattagaaacagcgatcgaatctctgccaatagaagctggtaggtggttatcactttacgcacagtcaaacaataatctaagtgatctattagcagccatgacagaggaccatcagctcatggcaagctgcgtcggttaccacttgttagaagagcccaaagataaaccaaactccctcagaggttacaaacacgctatcgccgagtgcatcattggactcattaactcaatcacctttagctcagagactgatcccaacacaatcttttggtcgctaaagaactatcaaaactacctagtggtacagccaaggagtatcaacgatgaaactaccgacaaatctagcctatgagcgctctatcgacccatcagatgtctgtttttttgtcgtctggcccgatgatagaaaaacacctttaacctacaattctcgtactctgctcgggcaaatggaagcggcatcattagcctatgatgtctcaggtcaaccaataaaaagtgccaccgctgaggcgttagctcaagggaaccctcatcaagttgatttctgccacgttccatacggtgcgagtcatattgaatgcagtttctccgtctcgttttcttctgaactacgtcaaccatataagtgtaactcaagcaaagttaaacaaacgctagtgcaattagtcgagctctacgaaacgaaaatcggctggactgagctagcaacccgatatttgatgaacatttgcaacggtaaatggctgtggaaaaatacccgtaaagcctattgctggaacattgtacttacaccttggccttggaacggggaaaaggttggatttgaagatattcgtactaactacacctcacggcaagactttaaaaataataaaaattggtctgctatagttgaaatgatcaaaaccgcattttctagtactgatgggctggcgatatttgaagtcagggccaccttgcacttgccaacgaatgctatggtgcggccaagccaagttttcacagaaaaagaaagtggcagtaaaagtaaatctaaaactcaaaacagtcgagtttttcagagtacaactattgatggtgaacgatcgccaatactaggggcctttaaaacgggagcagctattgcaaccattgacgactggtatcctgaagccactgagccactaagggtcggacggtttggggttcatcgcgaagatgtcacttgctaccgtcatccgtctaccggaaaagattttttctcgatattacaacaagcagagcactatattgaagtgttgagcgccaacaaaactcccgctcaagaaactatcaacgacatgcactttttaatggctaacctgattaagggtgggatgttccagcataaaggagactgactgtgaaatggtattataagacaatcacctttctgccagagttgtgcaacaacgagtcactggctgcaaagtgtctccgcgttctgcatggatttaactatcagtatgagacacgaaatatcggcgtttcatttccgctttggtgtgatgcaacggttggaaaaaagatttcatttgtcagcaagaacaagatagaactcgacttactacttaaacaacactatttcgtccaaatggaacaacttcaatactttcatatatccaacactgttctcgtcccagaagattgtacatacgtttcctttagacgctgtcaatctatagataagctcacagcagcagggctggcaaggaaaatcagacgcctggagaaacgtgctctatctagaggcgagcaatttgacccatcatcttttgctcaaaaagagcatactgcaatagcgcactaccactcacttggggagtccagcaaacagacgaaccgcaactttcgactcaatatcaggatgctctcggagcaaccccgtgaggggaactcgatttttagtagctatggcttatcaaattcagaaaactcgtttcagcctgtacccttaatctgacctaggctgctgccaccgctgagcaataactagcataaccccttggggcctctaaacgggtcttgaggggttttttgctgaaacctcaggcatttgagaagcacacggtcacactgcttccggtagtcaataaaccggtaaaccagcaatagacataagcggctatttaacgaccctgccctgaaccgacgaccgggtcatcgtggccggatcttgcggcccctcggcttgaacgaattgttagacattatttgccgactaccttggtgatctcgcctttcacgtagtggacaaattcttccaactgatctgcgcgcgaggccaagcgatcttcttcttgtccaagataagcctgtctagcttcaagtatgacgggctgatactgggccggcaggcgctccattgcccagtcggcagcgacatccttcggcgcgattttgccggttactgcgctgtaccaaatgcgggacaacgtaagcactacatttcgctcatcgccagcccagtcgggcggcgagttccatagcgttaaggtttcatttagcgcctcaaatagatcctgttcaggaaccggatcaaagagttcctccgccgctggacctaccaaggcaacgctatgttctcttgcttttgtcagcaagatagccagatcaatgtcgatcgtggctggctcgaagatacctgcaagaatgtcattgcgctgccattctccaaattgcagttcgcgcttagctggataacgccacggaatgatgtcgtcgtgcacaacaatggtgacttctacagcgcggagaatctcgctctctccaggggaagccgaagtttccaaaaggtcgttgatcaaagctcgccgcgttgtttcatcaagccttacggtcaccgtaaccagcaaatcaatatcactgtgtggcttcaggccgccatccactgcggagccgtacaaatgtacggccagcaacgtcggttcgagatggcgctcgatgacgccaactacctctgatagttgagtcgatacttcggcgatcaccgcttccctcatactcttcctttttcaatattattgaagcatttatcagggttattgtctcatgagcggatacatatttgaatgtatttagaaaaataaacaaatagctagctcactcggtcgctacgctccgggcgtgagactgcggcgggcgctgcggacacatacaaagttacccacagattccgtggataagcaggggactaacatgtgaggcaaaacagcagggccgcgccggtggcgtttttccataggctccgccctcctgccagagttcacataaacagacgcttttccggtgcatctgtgggagccgtgaggctcaaccatgaatctgacagtacgggcgaaacccgacaggacttaaagatccccaccgtttccggcgggtcgctccctcttgcgctctcctgttccgaccctgccgtttaccggatacctgttccgcctttctcccttacgggaagtgtggcgctttctcatagctcacacactggtatctcggctcggtgtaggtcgttcgctccaagctgggctgtaagcaagaactccccgttcagcccgactgctgcgccttatccggtaactgttcacttgagtccaacccggaaaagcacggtaaaacgccactggcagcagccattggtaactgggagttcgcagaggatttgtttagctaaacacgcggttgctcttgaagtgtgcgccaaagtccggctacactggaaggacagatttggttgctgtgctctgcgaaagccagttaccacggttaagcagttccccaactgacttaaccttcgatcaaaccacctccccaggtggttttttcgtttacagggcaaaagattacgcgcagaaaaaaaggatctcaagaagatcctttgatcttttctactgaaccgctctagatttcagtgcaatttatctcttcaaatgtagcacctgaagtcagccccatacgatataagttgtaattctcatgttagtcatgccccgcgcccaccggaaggagctgactgggttgaaggctctcaagggcatcggtcgagatcccggtgcctaatgagtgagctaacttacattaattgcgttgcgctcactgcccgctttccagtcgggaaacctgtcgtgccagctgcattaatgaatcggccaacgcgcggggagaggcggtttgcgtattgggcgccagggtggtttttcttttcaccagtgagacgggcaacagctgattgcccttcaccgcctggccctgagagagttgcagcaagcggtccacgctggtttgccccagcaggcgaaaatcctgtttgatggtggttaacggcgggatataacatgagctgtcttcggtatcgtcgtatcccactaccgagatgtccgcaccaacgcgcagcccggactcggtaatggcgcgcattgcgcccagcgccatctgatcgttggcaaccagcatcgcagtgggaacgatgccctcattcagcatttgcatggtttgttgaaaaccggacatggcactccagtcgccttcccgttccgctatcggctgaatttgattgcgagtgagatatttatgccagccagccagacgcagacgcgccgagacagaacttaatgggcccgctaacagcgcgatttgctggtgacccaatgcgaccagatgctccacgcccagtcgcgtaccgtcttcatgggagaaaataatactgttgatgggtgtctggtcagagacatcaagaaataacgccggaacattagtgcaggcagcttccacagcaatggcatcctggtcatccagcggatagttaatgatcagcccactgacgcgttgcgcgagaagattgtgcaccgccgctttacaggcttcgacgccgcttcgttctaccatcgacaccaccacgctggcacccagttgatcggcgcgagatttaatcgccgcgacaatttgcgacggcgcgtgcagggccagactggaggtggcaacgccaatcagcaacgactgtttgcccgccagttgttgtgccacgcggttgggaatgtaattcagctccgccatcgccgcttccactttttcccgcgttttcgcagaaacgtggctggcctggttcaccacgcgggaaacggtctgataagagacaccggcatactctgcgacatcgtataacgttactggtttcac

SEQ ID NO: 76 - DNA, 6858 bp, synthetic construct
  source 1..6858: mol_type = other DNA
ttcagtgcaatttatctcttcaaatgtagcacctgaagtcagccccatacgatataagttgtaattctcatgttagtcatgccccgcgcccaccggaaggagctgactgggttgaaggctctcaagggcatcggtcgagatcccggtgcctaatgagtgagctaacttacattaattgcgttgcgctcactgcccgctttccagtcgggaaacctgtcgtgccagctgcattaatgaatcggccaacgcgcggggagaggcggtttgcgtattgggcgccagggtggtttttcttttcaccagtgagacgggcaacagctgattgcccttcaccgcctggccctgagagagttgcagcaagcggtccacgctggtttgccccagcaggcgaaaatcctgtttgatggtggttaacggcgggatataacatgagctgtcttcggtatcgtcgtatcccactaccgagatgtccgcaccaacgcgcagcccggactcggtaatggcgcgcattgcgcccagcgccatctgatcgttggcaaccagcatcgcagtgggaacgatgccctcattcagcatttgcatggtttgttgaaaaccggacatggcactccagtcgccttcccgttccgctatcggctgaatttgattgcgagtgagatatttatgccagccagccagacgcagacgcgccgagacagaacttaatgggcccgctaacagcgcgatttgctggtgacccaatgcgaccagatgctccacgcccagtcgcgtaccgtcttcatgggagaaaataatactgttgatgggtgtctggtcagagacatcaagaaataacgccggaacattagtgcaggcagcttccacagcaatggcatcctggtcatccagcggatagttaatgatcagcccactgacgcgttgcgcgagaagattgtgcaccgccgctttacaggcttcgacgccgcttcgttctaccatcgacaccaccacgctggcacccagttgatcggcgcgagatttaatcgccgcgacaatttgcgacggcgcgtgcagggccagactggaggtggcaacgccaatcagcaacgactgtttgcccgccagttgttgtgccacgcggttgggaatgtaattcagctccgccatcgccgcttccactttttcccgcgttttcgcagaaacgtggctggcctggttcaccacgcgggaaacggtctgataagagacaccggcatactctgcgacatcgtataacgttactggtttcacattcaccaccctgaattgactctcttccgggcgctatcatgccataccgcgaaaggttttgcgccattcgatggtgtccgggatctcgacgctctcccttatgcgactcctgcattaggaaattaatacgactcactataggggaattgtgagcggataacaattcccctgtagaaataattttgtttaactttaataaggagatataccatggcgacaagtttacctacgccctcagcaattacgacttcggcgttagagtatgcattccatactcccgctcgcaatctaacgaaatctcgcggaaaaaacattcatcgttatgtcagtgtaaagatgagtaagaggattacggtagaatctactctagagtgtgatgcctgctatcactttgattttgagccaagtattgttcgcttttgcgctcaaccgattcgatttttatattatctcaatggtcagtctcactcctatgttcctgactttctagttcaatttgataccaacgagtttgttctatatgaagtaaagtcagcttatgctaagaacaaacctgattttgatgttgaatgggaggcgaaagtaaaagcagcaactgaactagggctagaattggagcttgttgaagagagtgatattagggatacggttgtattaaataatcttaagcgcatgcatcgttatgcttcgaaagatgagctgaataacgtacataactctctcttaaaaataataaagtacaatggcgcccaatctgcaagatgcttgggagaacagttgggtttaaaaggccgaactgttttaccaattttgtgcgatttgctgtcaaggtgtttactcgatacacgtttggataagcctctatctcttgaatctcgatttgagttggccagttatggctaagaaagggttctcaagtttccatagaaaagcagtctcttcccaagatacgcttgaatcgatagagcttgtctctagcgctaattgtctagaaagtgttacgtatcaagatatatcagcatttcccgaaacaattgcggtagagattaatttccgattaagcattcttcgctttttagcgcgaaagtgcgaaaccattgtggccaaatcaattgaaccacatcgtgtagagctacagcaaaactatagtagaaaaatacccagtgcaataacgatatatcgatggtggcttgcttttcgaaaatcagactacaaccccattagcttagcacctaatatcaaggatagaggtaatagagagacaaaagtgtcaacagttgttgattctattatggaacaggcagttgaaagagttatatctggacgaaaagtcaatgttagctctgcatataaacgtgttcgacgaaaagttcgtcaatacaatctaactcatggaacgaaatacacgtatcctaagtacgaatctgtaagaaagcgagtaaaaaagaaaaccccatttgagttattagccgcagggaaaggggagagagtagctaagagagagtttcgccgaatgggaaaaaagatcctcacgtctagcgtgctagagagggttgaaatagatcacactgtcgttgacctttttgcagtacacgaagagtatcgaatcccattgggccgaccttggcttactcaattggttgattgttacagtaaagctgtaatcggtttttatttaggtttcgagcctcctagctatgtgtcggtttcccttgcacttaagaatgcaatacaacgcaaagatgacttaatctcctcgtatgaatcgatcgagaatgaatggctatgttatggcatcccagacctactcgtaactgataatggtaaagagtttttgtcgaaagcatttgatcaagcatgtgaatcactattgatcaatgtgcatcaaaataaagttgagacgcccgacaacaaacctcatgttgaacgtaactacgggactattaatacttctctgttagacgatttacctgggaaatccttcagccagtaccttcaaagagaagggtacgactctgtgggagaagctacccttacactcaatgagattagagaaatttacttaatttggttggtggatatttatcataaaaaacccaatcagagaggcactaattgtcctaatgttgcgtggaaaaagggttgtcaagaatgggaaccagaggagttctctggttctaaagacgaattagactttaaatttgctattgttgattacaaacaacttactaaagtagggataactgtctacaaagaactgagttatagcaatgaccgtttagctgaatatagagggaagaaaggaaaccataaagttcagttcaagtataaccctgagtgtatggcagttatttgggtgttggatgaggatatgaatgagtactttacagttaatgcgattgactacgaatatgcaagtagagtatcactttggcaacataaatataacatgaaatatcaagcagaactaaattcagcagaatatgatgaggacaaggaaattgatgcagaaataaaaattgaagaaatcgcagatcgttcaattgttaagactaacaaaatcagagctcggaggcgtggcgctaggcatcaagagaatagcgcaagggctaagtcaatcagtaatgcgaacccggcctcgatacaaaaacatgaagatgaaatcgttagtgcagataatgacgattgggatattgattatgtctgagaaatcgtcaaatgagtgaaacgcgtgaggctcgtatatcaagagctaaaagggcatttgtatccacaccgagcgttaggaaaatcttgagttacatggatagatgtagagatctatcagacctagagtctgagcctacatgcatgatggtctatggtgcttcgggtgtaggtaaaacgaccgtcatcaagaaatacttaaatcaaaacagaagagagtccgaagccgggggcgatataataccggttttgcatattgagttgccagacaatgcgaagccagtagatgcagcaagggaattgctggttgaaatgggtgacccgctagcactttatgaaactgacttagctagattgacgaaaagactgactgaattaatccctgcggtcggcgtgaagctgattattatcgatgagttccaacatttggtggaagaaaggtcaaatcgggttcttacccaagtaggtaattggctaaaaatgatacttaacaaaacgaaatgtccaattgttatatttggtatgccatactcaaaagttgtactgcaagcaaactcgcaacttcacgggcgattttccattcaggttgaactgcgcccctttagctaccagggaggtagaggtgtatttaaaacttttttggaataccttgataaagccctaccttttgaaaaacaggctggcttagccaacgaaagtttgcagaaaaaattgtatgcattctctcagggaaacatgcgttcgttgagaaaccttatttatcaagcatctatcgaagcaattgataatcagcatgagacgataaccgaagaagatttcgtttttgcatcgaagttgacatcgggcgataaacccaactcatggaaaaatccttttgaggagggtgttgaggtaacagaagatatgttacgaccgccaccaaaagatattggttgggaggactatttgagacattcaaccccgagagtgagtaaaccaggtagaaataaaaactttttcgaataacctaggctgctgccaccgctgagcaataactagcataaccccttggggcctctaaacgggtcttgaggggttttttgctgaaacctcaggcatttgagaagcacacggtcacactgcttccggtagtcaataaaccggtaaaccagcaatagacataagcggctatttaacgaccctgccctgaaccgacgacaagctgacgaccgggtctccgcaagtggcacttttcggggaaatgtgcgcggaacccctatttgtttatttttctaaatacattcaaatatgtatccgctcatgaattaattcttagaaaaactcatcgagcatcaaatgaaactgcaatttattcatatcaggattatcaataccatatttttgaaaaagccgtttctgtaatgaaggagaaaactcaccgaggcagttccataggatggcaagatcctggtatcggtctgcgattccgactcgtccaacatcaatacaacctattaatttcccctcgtcaaaaataaggttatcaagtgagaaatcaccatgagtgacgactgaatccggtgagaatggcaaaagtttatgcatttctttccagacttgttcaacaggccagccattacgctcgtcatcaaaatcactcgcatcaaccaaaccgttattcattcgtgattgcgcctgagcgagacgaaatacgcggtcgctgttaaaaggacaattacaaacaggaatcgaatgcaaccggcgcaggaacactgccagcgcatcaacaatattttcacctgaatcaggatattcttctaatacctggaatgctgttttcccggggatcgcagtggtgagtaaccatgcatcatcaggagtacggataaaatgcttgatggtcggaagaggcataaattccgtcagccagtttagtctgaccatctcatctgtaacatcattggcaacgctacctttgccatgtttcagaaacaactctggcgcatcgggcttcccatacaatcgatagattgtcgcacctgattgcccgacattatcgcgagcccatttatacccatataaatcagcatccatgttggaatttaatcgcggcctagagcaagacgtttcccgttgaatatggctcatactcttcctttttcaatattattgaagcatttatcagggttattgtctcatgagcggatacatatttgaatgtatttagaaaaataaacaaataggcatgctagcgcagaaacgtcctagaagatgccaggaggatacttagcagagagacaataaggccggagcgaagccgtttttccataggctccgcccccctgacgaacatcacgaaatctgacgctcaaatcagtggtggcgaaacccgacaggactataaagataccaggcgtttccccctgatggctccctcttgcgctctcctgttcccgtcctgcggcgtccgtgttgtggtggaggctttacccaaatcaccacgtcccgttccgtgtagacagttcgctccaagctgggctgtgtgcaagaaccccccgttcagcccgactgctgcgccttatccggtaactatcatcttgagtccaacccggaaagacacgacaaaacgccactggcagcagccattggtaactgagaattagtggatttagatatcgagagtcttgaagtggtggcctaacagaggctacactgaaaggacagtatttggtatctgcgctccactaaagccagttaccaggttaagcagttccccaactgacttaaccttcgatcaaaccgcctccccaggcggttttttcgtttacagagcaggagattacgacgatcgtaaaaggatctcaagaagatcctttacggattcccgacaccatcactctagat

SEQ ID NO: 77 - DNA, 6897 bp, synthetic construct
  source 1..6897: mol_type = other DNA
ttcagtgcaatttatctcttcaaatgtagcacctgaagtcagccccatacgatataagttgtaattctcatgttagtcatgccccgcgcccaccggaaggagctgactgggttgaaggctctcaagggcatcggtcgagatcccggtgcctaatgagtgagctaacttacattaattgcgttgcgctcactgcccgctttccagtcgggaaacctgtcgtgccagctgcattaatgaatcggccaacgcgcggggagaggcggtttgcgtattgggcgccagggtggtttttcttttcaccagtgagacgggcaacagctgattgcccttcaccgcctggccctgagagagttgcagcaagcggtccacgctggtttgccccagcaggcgaaaatcctgtttgatggtggttaacggcgggatataacatgagctgtcttcggtatcgtcgtatcccactaccgagatgtccgcaccaacgcgcagcccggactcggtaatggcgcgcattgcgcccagcgccatctgatcgttggcaaccagcatcgcagtgggaacgatgccctcattcagcatttgcatggtttgttgaaaaccggacatggcactccagtcgccttcccgttccgctatcggctgaatttgattgcgagtgagatatttatgccagccagccagacgcagacgcgccgagacagaacttaatgggcccgctaacagcgcgatttgctggtgacccaatgcgaccagatgctccacgcccagtcgcgtaccgtcttcatgggagaaaataatactgttgatgggtgtctggtcagagacatcaagaaataacgccggaacattagtgcaggcagcttccacagcaatggcatcctggtcatccagcggatagttaatgatcagcccactgacgcgttgcgcgagaagattgtgcaccgccgctttacaggcttcgacgccgcttcgttctaccatcgacaccaccacgctggcacccagttgatcggcgcgagatttaatcgccgcgacaatttgcgacggcgcgtgcagggccagactggaggtggcaacgccaatcagcaacgactgtttgcccgccagttgttgtgccacgcggttgggaatgtaattcagctccgccatcgccgcttccactttttcccgcgttttcgcagaaacgtggctggcctggttcaccacgcgggaaacggtctgataagagacaccggcatactctgcgacatcgtataacgttactggtttcacattcaccaccctgaattgactctcttccgggcgctatcatgccataccgcgaaaggttttgcgccattcgatggtgtccgggatctcgacgctctcccttatgcgactcctgcattaggaaattaatacgactcactataggggaattgtgagcggataacaattcccctgtagaaataattttgtttaactttaataaggagatataccatgcctggccctaagaaaaagcgtaaagttggttccggtatggcgacaagtttacctacgccctcagcaattacgacttcggcgttagagtatgcattccatactcccgctcgcaatctaacgaaatctcgcggaaaaaacattcatcgttatgtcagtgtaaagatgagtaagaggattacggtagaatctactctagagtgtgatgcctgctatcactttgattttgagccaagtattgttcgcttttgcgctcaaccgattcgatttttatattatctcaatggtcagtctcactcctatgttcctgactttctagttcaatttgataccaacgagtttgttctatatgaagtaaagtcagcttatgctaagaacaaacctgattttgatgttgaatgggaggcgaaagtaaaagcagcaactgaactagggctagaattggagcttgttgaagagagtgatattagggatacggttgtattaaataatcttaagcgcatgcatcgttatgcttcgaaagatgagctgaataacgtacataactctctcttaaaaataataaagtacaatggcgcccaatctgcaagatgcttgggagaacagttgggtttaaaaggccgaactgttttaccaattttgtgcgatttgctgtcaaggtgtttactcgatacacgtttggataagcctctatctcttgaatctcgatttgagttggccagttatggctaagaaagggttctcaagtttccatagaaaagcagtctcttcccaagatacgcttgaatcgatagagcttgtctctagcgctaattgtctagaaagtgttacgtatcaagatatatcagcatttcccgaaacaattgcggtagagattaatttccgattaagcattcttcgctttttagcgcgaaagtgcgaaaccattgtggccaaatcaattgaaccacatcgtgtagagctacagcaaaactatagtagaaaaatacccagtgcaataacgatatatcgatggtggcttgcttttcgaaaatcagactacaaccccattagcttagcacctaatatcaaggatagaggtaatagagagacaaaagtgtcaacagttgttgattctattatggaacaggcagttgaaagagttatatctggacgaaaagtcaatgttagctctgcatataaacgtgttcgacgaaaagttcgtcaatacaatctaactcatggaacgaaatacacgtatcctaagtacgaatctgtaagaaagcgagtaaaaaagaaaaccccatttgagttattagccgcagggaaaggggagagagtagctaagagagagtttcgccgaatgggaaaaaagatcctcacgtctagcgtgctagagagggttgaaatagatcacactgtcgttgacctttttgcagtacacgaagagtatcgaatcccattgggccgaccttggcttactcaattggttgattgttacagtaaagctgtaatcggtttttatttaggtttcgagcctcctagctatgtgtcggtttcccttgcacttaagaatgcaatacaacgcaaagatgacttaatctcctcgtatgaatcgatcgagaatgaatggctatgttatggcatcccagacctactcgtaactgataatggtaaagagtttttgtcgaaagcatttgatcaagcatgtgaatcactattgatcaatgtgcatcaaaataaagttgagacgcccgacaacaaacctcatgttgaacgtaactacgggactattaatacttctctgttagacgatttacctgggaaatccttcagccagtaccttcaaagagaagggtacgactctgtgggagaagctacccttacactcaatgagattagagaaatttacttaatttggttggtggatatttatcataaaaaacccaatcagagaggcactaattgtcctaatgttgcgtggaaaaagggttgtcaagaatgggaaccagaggagttctctggttctaaagacgaattagactttaaatttgctattgttgattacaaacaacttactaaagtagggataactgtctacaaagaactgagttatagcaatgaccgtttagctgaatatagagggaagaaaggaaaccataaagttcagttcaagtataaccctgagtgtatggcagttatttgggtgttggatgaggatatgaatgagtactttacagttaatgcgattgactacgaatatgcaagtagagtatcactttggcaacataaatataacatgaaatatcaagcagaactaaattcagcagaatatgatgaggacaaggaaattgatgcagaaataaaaattgaagaaatcgcagatcgttcaattgttaagactaacaaaatcagagctcggaggcgtggcgctaggcatcaagagaatagcgcaagggctaagtcaatcagtaatgcgaacccggcctcgatacaaaaacatgaagatgaaatcgttagtgcagataatgacgattgggatattgattatgtctgagaaatcgtcaaatgagtgaaacgcgtgaggctcgtatatcaagagctaaaagggcatttgtatccacaccgagcgttaggaaaatcttgagttacatggatagatgtagagatctatcagacctagagtctgagcctacatgcatgatggtctatggtgcttcgggtgtaggtaaaacgaccgtcatcaagaaatacttaaatcaaaacagaagagagtccgaagccgggggcgatataataccggttttgcatattgagttgccagacaatgcgaagccagtagatgcagcaagggaattgctggttgaaatgggtgacccgctagcactttatgaaactgacttagctagattgacgaaaagactgactgaattaatccctgcggtcggcgtgaagctgattattatcgatgagttccaacatttggtggaagaaaggtcaaatcgggttcttacccaagtaggtaattggctaaaaatgatacttaacaaaacgaaatgtccaattgttatatttggtatgccatactcaaaagttgtactgcaagcaaactcgcaacttcacgggcgattttccattcaggttgaactgcgcccctttagctaccagggaggtagaggtgtatttaaaacttttttggaataccttgataaagccctaccttttgaaaaacaggctggcttagccaacgaaagtttgcagaaaaaattgtatgcattctctcagggaaacatgcgttcgttgagaaaccttatttatcaagcatctatcgaagcaattgataatcagcatgagacgataaccgaagaagatttcgtttttgcatcgaagttgacatcgggcgataaacccaactcatggaaaaatccttttgaggagggtgttgaggtaacagaagatatgttacgaccgccaccaaaagatattggttgggaggactatttgagacattcaaccccgagagtgagtaaaccaggtagaaataaaaactttttcgaataacctaggctgctgccaccgctgagcaataactagcataaccccttggggcctctaaacgggtcttgaggggttttttgctgaaacctcaggcatttgagaagcacacggtcacactgcttccggtagtcaataaaccggtaaaccagcaatagacataagcggctatttaacgaccctgccctgaaccgacgacaagctgacgaccgggtctccgcaagtggcacttttcggggaaatgtgcgcggaacccctatttgtttatttttctaaatacattcaaatatgtatccgctcatgaattaattcttagaaaaactcatcgagcatcaaatgaaactgcaatttattcatatcaggattatcaataccatatttttgaaaaagccgtttctgtaatgaaggagaaaactcaccgaggcagttccataggatggcaagatcctggtatcggtctgcgattccgactcgtccaacatcaatacaacctattaatttcccctcgtcaaaaataaggttatcaagtgagaaatcaccatgagtgacgactgaatccggtgagaatggcaaaagtttatgcatttctttccagacttgttcaacaggccagccattacgctcgtcatcaaaatcactcgcatcaaccaaaccgttattcattcgtgattgcgcctgagcgagacgaaatacgcggtcgctgttaaaaggacaattacaaacaggaatcgaatgcaaccggcgcaggaacactgccagcgcatcaacaatattttcacctgaatcaggatattcttctaatacctggaatgctgttttcccggggatcgcagtggtgagtaaccatgcatcatcaggagtacggataaaatgcttgatggtcggaagaggcataaattccgtcagccagtttagtctgaccatctcatctgtaacatcattggcaacgctacctttgccatgtttcagaaacaactctggcgcatcgggcttcccatacaatcgatagattgtcgcacctgattgcccgacattatcgcgagcccatttatacccatataaatcagcatccatgttggaatttaatcgcggcctagagcaagacgtttcccgttgaatatggctcatactcttcctttttcaatattattgaagcatttatcagggttattgtctcatgagcggatacatatttgaatgtatttagaaaaataaacaaataggcatgctagcgcagaaacgtcctagaagatgccaggaggatacttagcagagagacaataaggccggagcgaagccgtttttccataggctccgcccccctgacgaacatcacgaaatctgacgctcaaatcagtggtggcgaaacccgacaggactataaagataccaggcgtttccccctgatggctccctcttgcgctctcctgttcccgtcctgcggcgtccgtgttgtggtggaggctttacccaaatcaccacgtcccgttccgtgtagacagttcgctccaagctgggctgtgtgcaagaaccccccgttcagcccgactgctgcgccttatccggtaactatcatcttgagtccaacccggaaagacacgacaaaacgccactggcagcagccattggtaactgagaattagtggatttagatatcgagagtcttgaagtggtggcctaacagaggctacactgaaaggacagtatttggtatctgcgctccactaaagccagttaccaggttaagcagttccccaactgacttaaccttcgatcaaaccgcctccccaggcggttttttcgtttacagagcaggagattacgacgatcgtaaaaggatctcaagaagatcctttacggattcccgacaccatcactctagat

SEQ ID NO: 78 - DNA, 6975 bp, synthetic construct
  source 1..6975: mol_type = other DNA
ttcagtgcaatttatctcttcaaatgtagcacctgaagtcagccccatacgatataagttgtaattctcatgttagtcatgccccgcgcccaccggaaggagctgactgggttgaaggctctcaagggcatcggtcgagatcccggtgcctaatgagtgagctaacttacattaattgcgttgcgctcactgcccgctttccagtcgggaaacctgtcgtgccagctgcattaatgaatcggccaacgcgcggggagaggcggtttgcgtattgggcgccagggtggtttttcttttcaccagtgagacgggcaacagctgattgcccttcaccgcctggccctgagagagttgcagcaagcggtccacgctggtttgccccagcaggcgaaaatcctgtttgatggtggttaacggcgggatataacatgagctgtcttcggtatcgtcgtatcccactaccgagatgtccgcaccaacgcgcagcccggactcggtaatggcgcgcattgcgcccagcgccatctgatcgttggcaaccagcatcgcagtgggaacgatgccctcattcagcatttgcatggtttgttgaaaaccggacatggcactccagtcgccttcccgttccgctatcggctgaatttgattgcgagtgagatatttatgccagccagccagacgcagacgcgccgagacagaacttaatgggcccgctaacagcgcgatttgctggtgacccaatgcgaccagatgctccacgcccagtcgcgtaccgtcttcatgggagaaaataatactgttgatgggtgtctggtcagagacatcaagaaataacgccggaacattagtgcaggcagcttccacagcaatggcatcctggtcatccagcggatagttaatgatcagcccactgacgcgttgcgcgagaagattgtgcaccgccgctttacaggcttcgacgccgcttcgttctaccatcgacaccaccacgctggcacccagttgatcggcgcgagatttaatcgccgcgacaatttgcgacggcgcgtgcagggccagactggaggtggcaacgccaatcagcaacgactgtttgcccgccagttgttgtgccacgcggttgggaatgtaattcagctccgccatcgccgcttccactttttcccgcgttttcgcagaaacgtggctggcctggttcaccacgcgggaaacggtctgataagagacaccggcatactctgcgacatcgtataacgttactggtttcacattcaccaccctgaattgactctcttccgggcgctatcatgccataccgcgaaaggttttgcgccattcgatggtgtccgggatctcgacgctctcccttatgcgactcctgcattaggaaattaatacgactcactataggggaattgtgagcggataacaattcccctgtagaaataattttgtttaactttaataaggagatataccatggcgacaagtttacctacgccctcagcaattacgacttcggcgttagagtatgcattccatactcccgctcgcaatctaacgaaatctcgcggaaaaaacattcatcgttatgtcagtgtaaagatgagtaagaggattacggtagaatctactctagagtgtgatgcctgctatcactttgattttgagccaagtattgttcgcttttgcgctcaaccgattcgatttttatattatctcaatggtcagtctcactcctatgttcctgactttctagttcaatttgataccaacgagtttgttctatatgaagtaaagtcagcttatgctaagaacaaacctgattttgatgttgaatgggaggcgaaagtaaaagcagcaactgaactagggctagaattggagcttgttgaagagagtgatattagggatacggttgtattaaataatcttaagcgcatgcatcgttatgcttcgaaagatgagctgaataacgtacataactctctcttaaaaataataaagtacaatggcgcccaatctgcaagatgcttgggagaacagttgggtttaaaaggccgaactgttttaccaattttgtgcgatttgctgtcaaggtgtttactcgatacacgtttggataagcctctatctcttgaatctcgatttgagttggccagttacggtgggtcctctgagggtcgtggcagtcttttgacttgcggtgatgtagaagagaaccctggctaaaaggaggtaaataatgggccctaagaaaaagcgtaaagttggttccgcgatggctaagaaagggttctcaagtttccatagaaaagcagtctcttcccaagatacgcttgaatcgatagagcttgtctctagcgctaattgtctagaaagtgttacgtatcaagatatatcagcatttcccgaaacaattgcggtagagattaatttccgattaagcattcttcgctttttagcgcgaaagtgcgaaaccattgtggccaaatcaattgaaccacatcgtgtagagctacagcaaaactatagtagaaaaatacccagtgcaataacgatatatcgatggtggcttgcttttcgaaaatcagactacaaccccattagcttagcacctaatatcaaggatagaggtaatagagagacaaaagtgtcaacagttgttgattctattatggaacaggcagttgaaagagttatatctggacgaaaagtcaatgttagctctgcatataaacgtgttcgacgaaaagttcgtcaatacaatctaactcatggaacgaaatacacgtatcctaagtacgaatctgtaagaaagcgagtaaaaaagaaaaccccatttgagttattagccgcagggaaaggggagagagtagctaagagagagtttcgccgaatgggaaaaaagatcctcacgtctagcgtgctagagagggttgaaatagatcacactgtcgttgacctttttgcagtacacgaagagtatcgaatcccattgggccgaccttggcttactcaattggttgattgttacagtaaagctgtaatcggtttttatttaggtttcgagcctcctagctatgtgtcggtttcccttgcacttaagaatgcaatacaacgcaaagatgacttaatctcctcgtatgaatcgatcgagaatgaatggctatgttatggcatcccagacctactcgtaactgataatggtaaagagtttttgtcgaaagcatttgatcaagcatgtgaatcactattgatcaatgtgcatcaaaataaagttgagacgcccgacaacaaacctcatgttgaacgtaactacgggactattaatacttctctgttagacgatttacctgggaaatccttcagccagtaccttcaaagagaagggtacgactctgtgggagaagctacccttacactcaatgagattagagaaatttacttaatttggttggtggatatttatcataaaaaacccaatcagagaggcactaattgtcctaatgttgcgtggaaaaagggttgtcaagaatgggaaccagaggagttctctggttctaaagacgaattagactttaaatttgctattgttgattacaaacaacttactaaagtagggataactgtctacaaagaactgagttatagcaatgaccgtttagctgaatatagagggaagaaaggaaaccataaagttcagttcaagtataaccctgagtgtatggcagttatttgggtgttggatgaggatatgaatgagtactttacagttaatgcgattgactacgaatatgcaagtagagtatcactttggcaacataaatataacatgaaatatcaagcagaactaaattcagcagaatatgatgaggacaaggaaattgatgcagaaataaaaattgaagaaatcgcagatcgttcaattgttaagactaacaaaatcagagctcggaggcgtggcgctaggcatcaagagaatagcgcaagggctaagtcaatcagtaatgcgaacccggcctcgatacaaaaacatgaagatgaaatcgttagtgcagataatgacgattgggatattgattatgtctgagaaatcgtcaaatgagtgaaacgcgtgaggctcgtatatcaagagctaaaagggcatttgtatccacaccgagcgttaggaaaatcttgagttacatggatagatgtagagatctatcagacctagagtctgagcctacatgcatgatggtctatggtgcttcgggtgtaggtaaaacgaccgtcatcaagaaatacttaaatcaaaacagaagagagtccgaagccgggggcgatataataccggttttgcatattgagttgccagacaatgcgaagccagtagatgcagcaagggaattgctggttgaaatgggtgacccgctagcactttatgaaactgacttagctagattgacgaaaagactgactgaattaatccctgcggtcggcgtgaagctgattattatcgatgagttccaacatttggtggaagaaaggtcaaatcgggttcttacccaagtaggtaattggctaaaaatgatacttaacaaaacgaaatgtccaattgttatatttggtatgccatactcaaaagttgtactgcaagcaaactcgcaacttcacgggcgattttccattcaggttgaactgcgcccctttagctaccagggaggtagaggtgtatttaaaacttttttggaataccttgataaagccctaccttttgaaaaacaggctggcttagccaacgaaagtttgcagaaaaaattgtatgcattctctcagggaaacatgcgttcgttgagaaaccttatttatcaagcatctatcgaagcaattgataatcagcatgagacgataaccgaagaagatttcgtttttgcatcgaagttgacatcgggcgataaacccaactcatggaaaaatccttttgaggagggtgttgaggtaacagaagatatgttacgaccgccaccaaaagatattggttgggaggactatttgagacattcaaccccgagagtgagtaaaccaggtagaaataaaaactttttcgaataacctaggctgctgccaccgctgagcaataactagcataaccccttggggcctctaaacgggtcttgaggggttttttgctgaaacctcaggcatttgagaagcacacggtcacactgcttccggtagtcaataaaccggtaaaccagcaatagacataagcggctatttaacgaccctgccctgaaccgacgacaagctgacgaccgggtctccgcaagtggcacttttcggggaaatgtgcgcggaacccctatttgtttatttttctaaatacattcaaatatgtatccgctcatgaattaattcttagaaaaactcatcgagcatcaaatgaaactgcaatttattcatatcaggattatcaataccatatttttgaaaaagccgtttctgtaatgaaggagaaaactcaccgaggcagttccataggatggcaagatcctggtatcggtctgcgattccgactcgtccaacatcaatacaacctattaatttcccctcgtcaaaaataaggttatcaagtgagaaatcaccatgagtgacgactgaatccggtgagaatggcaaaagtttatgcatttctttccagacttgttcaacaggccagccattacgctcgtcatcaaaatcactcgcatcaaccaaaccgttattcattcgtgattgcgcctgagcgagacgaaatacgcggtcgctgttaaaaggacaattacaaacaggaatcgaatgcaaccggcgcaggaacactgccagcgcatcaacaatattttcacctgaatcaggatattcttctaatacctggaatgctgttttcccggggatcgcagtggtgagtaaccatgcatcatcaggagtacggataaaatgcttgatggtcggaagaggcataaattccgtcagccagtttagtctgaccatctcatctgtaacatcattggcaacgctacctttgccatgtttcagaaacaactctggcgcatcgggcttcccatacaatcgatagattgtcgcacctgattgcccgacattatcgcgagcccatttatacccatataaatcagcatccatgttggaatttaatcgcggcctagagcaagacgtttcccgttgaatatggctcatactcttcctttttcaatattattgaagcatttatcagggttattgtctcatgagcggatacatatttgaatgtatttagaaaaataaacaaataggcatgctagcgcagaaacgtcctagaagatgccaggaggatacttagcagagagacaataaggccggagcgaagccgtttttccataggctccgcccccctgacgaacatcacgaaatctgacgctcaaatcagtggtggcgaaacccgacaggactataaagataccaggcgtttccccctgatggctccctcttgcgctctcctgttcccgtcctgcggcgtccgtgttgtggtggaggctttacccaaatcaccacgtcccgttccgtgtagacagttcgctccaagctgggctgtgtgcaagaaccccccgttcagcccgactgctgcgccttatccggtaactatcatcttgagtccaacccggaaagacacgacaaaacgccactggcagcagccattggtaactgagaattagtggatttagatatcgagagtcttgaagtggtggcctaacagaggctacactgaaaggacagtatttggtatctgcgctccactaaagccagttaccaggttaagcagttccccaactgacttaaccttcgatcaaaccgcctccccaggcggttttttcgtttacagagcaggagattacgacgatcgtaaaaggatctcaagaagatcctttacggattcccgacaccatcactctagat

SEQ ID NO: 79 - DNA, 6920 bp, synthetic construct
  source 1..6920: mol_type = other DNA
ttcagtgcaatttatctcttcaaatgtagcacctgaagtcagccccatacgatataagttgtaattctcatgttagtcatgccccgcgcccaccggaaggagctgactgggttgaaggctctcaagggcatcggtcgagatcccggtgcctaatgagtgagctaacttacattaattgcgttgcgctcactgcccgctttccagtcgggaaacctgtcgtgccagctgcattaatgaatcggccaacgcgcggggagaggcggtttgcgtattgggcgccagggtggtttttcttttcaccagtgagacgggcaacagctgattgcccttcaccgcctggccctgagagagttgcagcaagcggtccacgctggtttgccccagcaggcgaaaatcctgtttgatggtggttaacggcgggatataacatgagctgtcttcggtatcgtcgtatcccactaccgagatgtccgcaccaacgcgcagcccggactcggtaatggcgcgcattgcgcccagcgccatctgatcgttggcaaccagcatcgcagtgggaacgatgccctcattcagcatttgcatggtttgttgaaaaccggacatggcactccagtcgccttcccgttccgctatcggctgaatttgattgcgagtgagatatttatgccagccagccagacgcagacgcgccgagacagaacttaatgggcccgctaacagcgcgatttgctggtgacccaatgcgaccagatgctccacgcccagtcgcgtaccgtcttcatgggagaaaataatactgttgatgggtgtctggtcagagacatcaagaaataacgccggaacattagtgcaggcagcttccacagcaatggcatcctggtcatccagcggatagttaatgatcagcccactgacgcgttgcgcgagaagattgtgcaccgccgctttacaggcttcgacgccgcttcgttctaccatcgacaccaccacgctggcacccagttgatcggcgcgagatttaatcgccgcgacaatttgcgacggcgcgtgcagggccagactggaggtggcaacgccaatcagcaacgactgtttgcccgccagttgttgtgccacgcggttgggaatgtaattcagctccgccatcgccgcttccactttttcccgcgttttcgcagaaacgtggctggcctggttcaccacgcgggaaacggtctgataagagacaccggcatactctgcgacatcgtataacgttactggtttcacattcaccaccctgaattgactctcttccgggcgctatcatgccataccgcgaaaggttttgcgccattcgatggtgtccgggatctcgacgctctcccttatgcgactcctgcattaggaaattaatacgactcactataggggaattgtgagcggataacaattcccctgtagaaataattttgtttaactttaataaggagatataccatggcgacaagtttacctacgccctcagcaattacgacttcggcgttagagtatgcattccatactcccgctcgcaatctaacgaaatctcgcggaaaaaacattcatcgttatgtcagtgtaaagatgagtaagaggattacggtagaatctactctagagtgtgatgcctgctatcactttgattttgagccaagtattgttcgcttttgcgctcaaccgattcgatttttatattatctcaatggtcagtctcactcctatgttcctgactttctagttcaatttgataccaacgagtttgttctatatgaagtaaagtcagcttatgctaagaacaaacctgattttgatgttgaatgggaggcgaaagtaaaagcagcaactgaactagggctagaattggagcttgttgaagagagtgatattagggatacggttgtattaaataatcttaagcgcatgcatcgttatgcttcgaaagatgagctgaataacgtacataactctctcttaaaaataataaagtacaatggcgcccaatctgcaagatgcttgggagaacagttgggtttaaaaggccgaactgttttaccaattttgtgcgatttgctgtcaaggtgtttactcgatacacgtttggataagcctctatctcttgaatctcgatttgagttggccagttatggctaagaaagggttctcaagtttccatagaaaagcagtctcttcccaagatacgcttgaatcgatagagcttgtctctagcgctaattgtctagaaagtgttacgtatcaagatatatcagcatttcccgaaacaattgcggtagagattaatttccgattaagcattcttcgctttttagcgcgaaagtgcgaaaccattgtggccaaatcaattgaaccacatcgtgtagagctacagcaaaactatagtagaaaaatacccagtgcaataacgatatatcgatggtggcttgcttttcgaaaatcagactacaaccccattagcttagcacctaatatcaaggatagaggtaatagagagacaaaagtgtcaacagttgttgattctattatggaacaggcagttgaaagagttatatctggacgaaaagtcaatgttagctctgcatataaacgtgttcgacgaaaagttcgtcaatacaatctaactcatggaacgaaatacacgtatcctaagtacgaatctgtaagaaagcgagtaaaaaagaaaaccccatttgagttattagccgcagggaaaggggagagagtagctaagagagagtttcgccgaatgggaaaaaagatcctcacgtctagcgtgctagagagggttgaaatagatcacactgtcgttgacctttttgcagtacacgaagagtatcgaatcccattgggccgaccttggcttactcaattggttgattgttacagtaaagctgtaatcggtttttatttaggtttcgagcctcctagctatgtgtcggtttcccttgcacttaagaatgcaatacaacgcaaagatgacttaatctcctcgtatgaatcgatcgagaatgaatggctatgttatggcatcccagacctactcgtaactgataatggtaaagagtttttgtcgaaagcatttgatcaagcatgtgaatcactattgatcaatgtgcatcaaaataaagttgagacgcccgacaacaaacctcatgttgaacgtaactacgggactattaatacttctctgttagacgatttacctgggaaatccttcagccagtaccttcaaagagaagggtacgactctgtgggagaagctacccttacactcaatgagattagagaaatttacttaatttggttggtggatatttatcataaaaaacccaatcagagaggcactaattgtcctaatgttgcgtggaaaaagggttgtcaagaatgggaaccagaggagttctctggttctaaagacgaattagactttaaatttgctattgttgattacaaacaacttactaaagtagggataactgtctacaaagaactgagttatagcaatgaccgtttagctgaatatagagggaagaaaggaaaccataaagttcagttcaagtataaccctgagtgtatggcagttatttgggtgttggatgaggatatgaatgagtactttacagttaatgcgattgactacgaatatgcaagtagagtatcactttggcaacataaatataacatgaaatatcaagcagaactaaattcagcagaatatgatgaggacaaggaaattgatgcagaaataaaaattgaagaaatcgcagatcgttcaattgttaagactaacaaaatcagagctcggaggcgtggcgctaggcatcaagagaatagcgcaagggctaagtcaatcagtaatgcgaacccggcctcgatacaaaaacatgaagatgaaatcgttagtgcagataatgacgattgggatattgattatgtcgggtccggcgagggtcgtggcagtcttttgacttgcggtgatgtagaagagaaccctggctgaaaggaggtaaataatgagtgaaacgcgtgaggctcgtatatcaagagctaaaagggcatttgtatccacaccgagcgttaggaaaatcttgagttacatggatagatgtagagatctatcagacctagagtctgagcctacatgcatgatggtctatggtgcttcgggtgtaggtaaaacgaccgtcatcaagaaatacttaaatcaaaacagaagagagtccgaagccgggggcgatataataccggttttgcatattgagttgccagacaatgcgaagccagtagatgcagcaagggaattgctggttgaaatgggtgacccgctagcactttatgaaactgacttagctagattgacgaaaagactgactgaattaatccctgcggtcggcgtgaagctgattattatcgatgagttccaacatttggtggaagaaaggtcaaatcgggttcttacccaagtaggtaattggctaaaaatgatacttaacaaaacgaaatgtccaattgttatatttggtatgccatactcaaaagttgtactgcaagcaaactcgcaacttcacgggcgattttccattcaggttgaactgcgcccctttagctaccagggaggtagaggtgtatttaaaacttttttggaataccttgataaagccctaccttttgaaaaacaggctggcttagccaacgaaagtttgcagaaaaaattgtatgcattctctcagggaaacatgcgttcgttgagaaaccttatttatcaagcatctatcgaagcaattgataatcagcatgagacgataaccgaagaagatttcgtttttgcatcgaagttgacatcgggcgataaacccaactcatggaaaaatccttttgaggagggtgttgaggtaacagaagatatgttacgaccgccaccaaaagatattggttgggaggactatttgagacattcaaccccgagagtgagtaaaccaggtagaaataaaaactttttcgaataacctaggctgctgccaccgctgagcaataactagcataaccccttggggcctctaaacgggtcttgaggggttttttgctgaaacctcaggcatttgagaagcacacggtcacactgcttccggtagtcaataaaccggtaaaccagcaatagacataagcggctatttaacgaccctgccctgaaccgacgacaagctgacgaccgggtctccgcaagtggcacttttcggggaaatgtgcgcggaacccctatttgtttatttttctaaatacattcaaatatgtatccgctcatgaattaattcttagaaaaactcatcgagcatcaaatgaaactgcaatttattcatatcaggattatcaataccatatttttgaaaaagccgtttctgtaatgaaggagaaaactcaccgaggcagttccataggatggcaagatcctggtatcggtctgcgattccgactcgtccaacatcaatacaacctattaatttcccctcgtcaaaaataaggttatcaagtgagaaatcaccatgagtgacgactgaatccggtgagaatggcaaaagtttatgcatttctttccagacttgttcaacaggccagccattacgctcgtcatcaaaatcactcgcatcaaccaaaccgttattcattcgtgattgcgcctgagcgagacgaaatacgcggtcgctgttaaaaggacaattacaaacaggaatcgaatgcaaccggcgcaggaacactgccagcgcatcaacaatattttcacctgaatcaggatattcttctaatacctggaatgctgttttcccggggatcgcagtggtgagtaaccatgcatcatcaggagtacggataaaatgcttgatggtcggaagaggcataaattccgtcagccagtttagtctgaccatctcatctgtaacatcattggcaacgctacctttgccatgtttcagaaacaactctggcgcatcgggcttcccatacaatcgatagattgtcgcacctgattgcccgacattatcgcgagcccatttatacccatataaatcagcatccatgttggaatttaatcgcggcctagagcaagacgtttcccgttgaatatggctcatactcttcctttttcaatattattgaagcatttatcagggttattgtctcatgagcggatacatatttgaatgtatttagaaaaataaacaaataggcatgctagcgcagaaacgtcctagaagatgccaggaggatacttagcagagagacaataaggccggagcgaagccgtttttccataggctccgcccccctgacgaacatcacgaaatctgacgctcaaatcagtggtggcgaaacccgacaggactataaagataccaggcgtttccccctgatggctccctcttgcgctctcctgttcccgtcctgcggcgtccgtgttgtggtggaggctttacccaaatcaccacgtcccgttccgtgtagacagttcgctccaagctgggctgtgtgcaagaaccccccgttcagcccgactgctgcgccttatccggtaactatcatcttgagtccaacccggaaagacacgacaaaacgccactggcagcagccattggtaactgagaattagtggatttagatatcgagagtcttgaagtggtggcctaacagaggctacactgaaaggacagtatttggtatctgcgctccactaaagccagttaccaggttaagcagttccccaactgacttaaccttcgatcaaaccgcctccccaggcggttttttcgtttacagagcaggagattacgacgatcgtaaaaggatctcaagaagatcctttacggattcccgacaccatcactctagat

SEQ ID NO: 80 - DNA, 6899 bp, synthetic construct
  source 1..6899: mol_type = other DNA
ttcagtgcaatttatctcttcaaatgtagcacctgaagtcagccccatacgatataagttgtaattctcatgttagtcatgccccgcgcccaccggaaggagctgactgggttgaaggctctcaagggcatcggtcgagatcccggtgcctaatgagtgagctaacttacattaattgcgttgcgctcactgcccgctttccagtcgggaaacctgtcgtgccagctgcattaatgaatcggccaacgcgcggggagaggcggtttgcgtattgggcgccagggtggtttttcttttcaccagtgagacgggcaacagctgattgcccttcaccgcctggccctgagagagttgcagcaagcggtccacgctggtttgccccagcaggcgaaaatcctgtttgatggtggttaacggcgggatataacatgagctgtcttcggtatcgtcgtatcccactaccgagatgtccgcaccaacgcgcagcccggactcggtaatggcgcgcattgcgcccagcgccatctgatcgttggcaaccagcatcgcagtgggaacgatgccctcattcagcatttgcatggtttgttgaaaaccggacatggcactccagtcgccttcccgttccgctatcggctgaatttgattgcgagtgagatatttatgccagccagccagacgcagacgcgccgagacagaacttaatgggcccgctaacagcgcgatttgctggtgacccaatgcgaccagatgctccacgcccagtcgcgtaccgtcttcatgggagaaaataatactgttgatgggtgtctggtcagagacatcaagaaataacgccggaacattagtgcaggcagcttccacagcaatggcatcctggtcatccagcggatagttaatgatcagcccactgacgcgttgcgcgagaagattgtgcaccgccgctttacaggcttcgacgccgcttcgttctaccatcgacaccaccacgctggcacccagttgatcggcgcgagatttaatcgccgcgacaatttgcgacggcgcgtgcagggccagactggaggtggcaacgccaatcagcaacgactgtttgcccgccagttgttgtgccacgcggttgggaatgtaattcagctccgccatcgccgcttccactttttcccgcgttttcgcagaaacgtggctggcctggttcaccacgcgggaaacggtctgataagagacaccggcatactctgcgacatcgtataacgttactggtttcacattcaccaccctgaattgactctcttccgggcgctatcatgccataccgcgaaaggttttgcgccattcgatggtgtccgggatctcgacgctctcccttatgcgactcctgcattaggaaattaatacgactcactataggggaattgtgagcggataacaattcccctgtagaaataattttgtttaactttaataaggagatataccatggcgacaagtttacctacgccctcagcaattacgacttcggcgttagagtatgcattccatactcccgctcgcaatctaacgaaatctcgcggaaaaaacattcatcgttatgtcagtgtaaagatgagtaagaggattacggtagaatctactctagagtgtgatgcctgctatcactttgattttgagccaagtattgttcgcttttgcgctcaaccgattcgatttttatattatctcaatggtcagtctcactcctatgttcctgactttctagttcaatttgataccaacgagtttgttctatatgaagtaaagtcagcttatgctaagaacaaacctgattttgatgttgaatgggaggcgaaagtaaaagcagcaactgaactagggctagaattggagcttgttgaagagagtgatattagggatacggttgtattaaataatcttaagcgcatgcatcgttatgcttcgaaagatgagctgaataacgtacataactctctcttaaaaataataaagtacaatggcgcccaatctgcaagatgcttgggagaacagttgggtttaaaaggccgaactgttttaccaattttgtgcgatttgctgtcaaggtgtttactcgatacacgtttggataagcctctatctcttgaatctcgatttgagttggccagttatggctaagaaagggttctcaagtttccatagaaaagcagtctcttcccaagatacgcttgaatcgatagagcttgtctctagcgctaattgtctagaaagtgttacgtatcaagatatatcagcatttcccgaaacaattgcggtagagattaatttccgattaagcattcttcgctttttagcgcgaaagtgcgaaaccattgtggccaaatcaattgaaccacatcgtgtagagctacagcaaaactatagtagaaaaatacccagtgcaataacgatatatcgatggtggcttgcttttcgaaaatcagactacaaccccattagcttagcacctaatatcaaggatagaggtaatagagagacaaaagtgtcaacagttgttgattctattatggaacaggcagttgaaagagttatatctggacgaaaagtcaatgttagctctgcatataaacgtgttcgacgaaaagttcgtcaatacaatctaactcatggaacgaaatacacgtatcctaagtacgaatctgtaagaaagcgagtaaaaaagaaaaccccatttgagttattagccgcagggaaaggggagagagtagctaagagagagtttcgccgaatgggaaaaaagatcctcacgtctagcgtgctagagagggttgaaatagatcacactgtcgttgacctttttgcagtacacgaagagtatcgaatcccattgggccgaccttggcttactcaattggttgattgttacagtaaagctgtaatcggtttttatttaggtttcgagcctcctagctatgtgtcggtttcccttgcacttaagaatgcaatacaacgcaaagatgacttaatctcctcgtatgaatcgatcgagaatgaatggctatgttatggcatcccagacctactcgtaactgataatggtaaagagtttttgtcgaaagcatttgatcaagcatgtgaatcactattgatcaatgtgcatcaaaataaagttgagacgcccgacaacaaacctcatgttgaacgtaactacgggactattaatacttctctgttagacgatttacctgggaaatccttcagccagtaccttcaaagagaagggtacgactctgtgggagaagctacccttacactcaatgagattagagaaatttacttaatttggttggtggatatttatcataaaaaacccaatcagagaggcactaattgtcctaatgttgcgtggaaaaagggttgtcaagaatgggaaccagaggagttctctggttctaaagacgaattagactttaaatttgctattgttgattacaaacaacttactaaagtagggataactgtctacaaagaactgagttatagcaatgaccgtttagctgaatatagagggaagaaaggaaaccataaagttcagttcaagtataaccctgagtgtatggcagttatttgggtgttggatgaggatatgaatgagtactttacagttaatgcgattgactacgaatatgcaagtagagtatcactttggcaacataaatataacatgaaatatcaagcagaactaaattcagcagaatatgatgaggacaaggaaattgatgcagaaataaaaattgaagaaatcgcagatcgttcaattgttaagactaacaaaatcagagctcggaggcgtggcgctaggcatcaagagaatagcgcaagggctaagtcaatcagtaatgcgaacccggcctcgatacaaaaacatgaagatgaaatcgttagtgcagataatgacgattgggatattgattatgtctgaaaggaggtaaataatgccttcccctaagaaaaagcgtaaagttggcaccggtatgagtgaaacgcgtgaggctcgtatatcaagagctaaaagggcatttgtatccacaccgagcgttaggaaaatcttgagttacatggatagatgtagagatctatcagacctagagtctgagcctacatgcatgatggtctatggtgcttcgggtgtaggtaaaacgaccgtcatcaagaaatacttaaatcaaaacagaagagagtccgaagccgggggcgatataataccggttttgcatattgagttgccagacaatgcgaagccagtagatgcagcaagggaattgctggttgaaatgggtgacccgctagcactttatgaaactgacttagctagattgacgaaaagactgactgaattaatccctgcggtcggcgtgaagctgattattatcgatgagttccaacatttggtggaagaaaggtcaaatcgggttcttacccaagtaggtaattggctaaaaatgatacttaacaaaacgaaatgtccaattgttatatttggtatgccatactcaaaagttgtactgcaagcaaactcgcaacttcacgggcgattttccattcaggttgaactgcgcccctttagctaccagggaggtagaggtgtatttaaaacttttttggaataccttgataaagccctaccttttgaaaaacaggctggcttagccaacgaaagtttgcagaaaaaattgtatgcattctctcagggaaacatgcgttcgttgagaaaccttatttatcaagcatctatcgaagcaattgataatcagcatgagacgataaccgaagaagatttcgtttttgcatcgaagttgacatcgggcgataaacccaactcatggaaaaatccttttgaggagggtgttgaggtaacagaagatatgttacgaccgccaccaaaagatattggttgggaggactatttgagacattcaaccccgagagtgagtaaaccaggtagaaataaaaactttttcgaataacctaggctgctgccaccgctgagcaataactagcataaccccttggggcctctaaacgggtcttgaggggttttttgctgaaacctcaggcatttgagaagcacacggtcacactgcttccggtagtcaataaaccggtaaaccagcaatagacataagcggctatttaacgaccctgccctgaaccgacgacaagctgacgaccgggtctccgcaagtggcacttttcggggaaatgtgcgcggaacccctatttgtttatttttctaaatacattcaaatatgtatccgctcatgaattaattcttagaaaaactcatcgagcatcaaatgaaactgcaatttattcatatcaggattatcaataccatatttttgaaaaagccgtttctgtaatgaaggagaaaactcaccgaggcagttccataggatggcaagatcctggtatcggtctgcgattccgactcgtccaacatcaatacaacctattaatttcccctcgtcaaaaataaggttatcaagtgagaaatcaccatgagtgacgactgaatccggtgagaatggcaaaagtttatgcatttctttccagacttgttcaacaggccagccattacgctcgtcatcaaaatcactcgcatcaaccaaaccgttattcattcgtgattgcgcctgagcgagacgaaatacgcggtcgctgttaaaaggacaattacaaacaggaatcgaatgcaaccggcgcaggaacactgccagcgcatcaacaatattttcacctgaatcaggatattcttctaatacctggaatgctgttttcccggggatcgcagtggtgagtaaccatgcatcatcaggagtacggataaaatgcttgatggtcggaagaggcataaattccgtcagccagtttagtctgaccatctcatctgtaacatcattggcaacgctacctttgccatgtttcagaaacaactctggcgcatcgggcttcccatacaatcgatagattgtcgcacctgattgcccgacattatcgcgagcccatttatacccatataaatcagcatccatgttggaatttaatcgcggcctagagcaagacgtttcccgttgaatatggctcatactcttcctttttcaatattattgaagcatttatcagggttattgtctcatgagcggatacatatttgaatgtatttagaaaaataaacaaataggcatgctagcgcagaaacgtcctagaagatgccaggaggatacttagcagagagacaataaggccggagcgaagccgtttttccataggctccgcccccctgacgaacatcacgaaatctgacgctcaaatcagtggtggcgaaacccgacaggactataaagataccaggcgtttccccctgatggctccctcttgcgctctcctgttcccgtcctgcggcgtccgtgttgtggtggaggctttacccaaatcaccacgtcccgttccgtgtagacagttcgctccaagctgggctgtgtgcaagaaccccccgttcagcccgactgctgcgccttatccggtaactatcatcttgagtccaacccggaaagacacgacaaaacgccactggcagcagccattggtaactgagaattagtggatttagatatcgagagtcttgaagtggtggcctaacagaggctacactgaaaggacagtatttggtatctgcgctccactaaagccagttaccaggttaagcagttccccaactgacttaaccttcgatcaaaccgcctccccaggcggttttttcgtttacagagcaggagattacgacgatcgtaaaaggatctcaagaagatcctttacggattcccgacaccatcactctagat

SEQ ID NO: 81 - DNA, 6918 bp, synthetic construct
  source 1..6918: mol_type = other DNA
ttcagtgcaatttatctcttcaaatgtagcacctgaagtcagccccatacgatataagttgtaattctcatgttagtcatgccccgcgcccaccggaaggagctgactgggttgaaggctctcaagggcatcggtcgagatcccggtgcctaatgagtgagctaacttacattaattgcgttgcgctcactgcccgctttccagtcgggaaacctgtcgtgccagctgcattaatgaatcggccaacgcgcggggagaggcggtttgcgtattgggcgccagggtggtttttcttttcaccagtgagacgggcaacagctgattgcccttcaccgcctggccctgagagagttgcagcaagcggtccacgctggtttgccccagcaggcgaaaatcctgtttgatggtggttaacggcgggatataacatgagctgtcttcggtatcgtcgtatcccactaccgagatgtccgcaccaacgcgcagcccggactcggtaatggcgcgcattgcgcccagcgccatctgatcgttggcaaccagcatcgcagtgggaacgatgccctcattcagcatttgcatggtttgttgaaaaccggacatggcactccagtcgccttcccgttccgctatcggctgaatttgattgcgagtgagatatttatgccagccagccagacgcagacgcgccgagacagaacttaatgggcccgctaacagcgcgatttgctggtgacccaatgcgaccagatgctccacgcccagtcgcgtaccgtcttcatgggagaaaataatactgttgatgggtgtctggtcagagacatcaagaaataacgccggaacattagtgcaggcagcttccacagcaatggcatcctggtcatccagcggatagttaatgatcagcccactgacgcgttgcgcgagaagattgtgcaccgccgctttacaggcttcgacgccgcttcgttctaccatcgacaccaccacgctggcacccagttgatcggcgcgagatttaatcgccgcgacaatttgcgacggcgcgtgcagggccagactggaggtggcaacgccaatcagcaacgactgtttgcccgccagttgttgtgccacgcggttgggaatgtaattcagctccgccatcgccgcttccactttttcccgcgttttcgcagaaacgtggctggcctggttcaccacgcgggaaacggtctgataagagacaccggcatactctgcgacatcgtataacgttactggtttcacattcaccaccctgaattgactctcttccgggcgctatcatgccataccgcgaaaggttttgcgccattcgatggtgtccgggatctcgacgctctcccttatgcgactcctgcattaggaaattaatacgactcactataggggaattgtgagcggataacaattcccctgtagaaataattttgtttaactttaataaggagatataccatggcgacaagtttacctacgccctcagcaattacgacttcggcgttagagtatgcattccatactcccgctcgcaatctaacgaaatctcgcggaaaaaacattcatcgttatgtcagtgtaaagatgagtaagaggattacggtagaatctactctagagtgtgatgcctgctatcactttgattttgagccaagtattgttcgcttttgcgctcaaccgattcgatttttatattatctcaatggtcagtctcactcctatgttcctgactttctagttcaatttgataccaacgagtttgttctatatgaagtaaagtcagcttatgctaagaacaaacctgattttgatgttgaatgggaggcgaaagtaaaagcagcaactgaactagggctagaattggagcttgttgaagagagtgatattagggatacggttgtattaaataatcttaagcgcatgcatcgttatgcttcgaaagatgagctgaataacgtacataactctctcttaaaaataataaagtacaatggcgcccaatctgcaagatgcttgggagaacagttgggtttaaaaggccgaactgttttaccaattttgtgcgatttgctgtcaaggtgtttactcgatacacgtttggataagcctctatctcttgaatctcgatttgagttggccagttatggctaagaaagggttctcaagtttccatagaaaagcagtctcttcccaagatacgcttgaatcgatagagcttgtctctagcgctaattgtctagaaagtgttacgtatcaagatatatcagcatttcccgaaacaattgcggtagagattaatttccgattaagcattcttcgctttttagcgcgaaagtgcgaaaccattgtggccaaatcaattgaaccacatcgtgtagagctacagcaaaactatagtagaaaaatacccagtgcaataacgatatatcgatggtggcttgcttttcgaaaatcagactacaaccccattagcttagcacctaatatcaaggatagaggtaatagagagacaaaagtgtcaacagttgttgattctattatggaacaggcagttgaaagagttatatctggacgaaaagtcaatgttagctctgcatataaacgtgttcgacgaaaagttcgtcaatacaatctaactcatggaacgaaatacacgtatcctaagtacgaatctgtaagaaagcgagtaaaaaagaaaaccccatttgagttattagccgcagggaaaggggagagagtagctaagagagagtttcgccgaatgggaaaaaagatcctcacgtctagcgtgctagagagggttgaaatagatcacactgtcgttgacctttttgcagtacacgaagagtatcgaatcccattgggccgaccttggcttactcaattggttgattgttacagtaaagctgtaatcggtttttatttaggtttcgagcctcctagctatgtgtcggtttcccttgcacttaagaatgcaatacaacgcaaagatgacttaatctcctcgtatgaatcgatcgagaatgaatggctatgttatggcatcccagacctactcgtaactgataatggtaaagagtttttgtcgaaagcatttgatcaagcatgtgaatcactattgatcaatgtgcatcaaaataaagttgagacgcccgacaacaaacctcatgttgaacgtaactacgggactattaatacttctctgttagacgatttacctgggaaatccttcagccagtaccttcaaagagaagggtacgactctgtgggagaagctacccttacactcaatgagattagagaaatttacttaatttggttggtggatatttatcataaaaaacccaatcagagaggcactaattgtcctaatgttgcgtggaaaaagggttgtcaagaatgggaaccagaggagttctctggttctaaagacgaattagactttaaatttgctattgttgattacaaacaacttactaaagtagggataactgtctacaaagaactgagttatagcaatgaccgtttagctgaatatagagggaagaaaggaaaccataaagttcagttcaagtataaccctgagtgtatggcagttatttgggtgttggatgaggatatgaatgagtactttacagttaatgcgattgactacgaatatgcaagtagagtatcactttggcaacataaatataacatgaaatatcaagcagaactaaattcagcagaatatgatgaggacaaggaaattgatgcagaaataaaaattgaagaaatcgcagatcgttcaattgttaagactaacaaaatcagagctcggaggcgtggcgctaggcatcaagagaatagcgcaagggctaagtcaatcagtaatgcgaacccggcctcgatacaaaaacatgaagatgaaatcgttagtgcagataatgacgattgggatattgattatgtctgagaaatcgtcaaatgagtgaaacgcgtgaggctcgtatatcaagagctaaaagggcatttgtatccacaccgagcgttaggaaaatcttgagttacatggatagatgtagagatctatcagacctagagtctgagcctacatgcatgatggtctatggtgcttcgggtgtaggtaaaacgaccgtcatcaagaaatacttaaatcaaaacagaagagagtccgaagccgggggcgatataataccggttttgcatattgagttgccagacaatgcgaagccagtagatgcagcaagggaattgctggttgaaatgggtgacccgctagcactttatgaaactgacttagctagattgacgaaaagactgactgaattaatccctgcggtcggcgtgaagctgattattatcgatgagttccaacatttggtggaagaaaggtcaaatcgggttcttacccaagtaggtaattggctaaaaatgatacttaacaaaacgaaatgtccaattgttatatttggtatgccatactcaaaagttgtactgcaagcaaactcgcaacttcacgggcgattttccattcaggttgaactgcgcccctttagctaccagggaggtagaggtgtatttaaaacttttttggaataccttgataaagccctaccttttgaaaaacaggctggcttagccaacgaaagtttgcagaaaaaattgtatgcattctctcagggaaacatgcgttcgttgagaaaccttatttatcaagcatctatcgaagcaattgataatcagcatgagacgataaccgaagaagatttcgtttttgcatcgaagttgacatcgggcgataaacccaactcatggaaaaatccttttgaggagggtgttgaggtaacagaagatatgttacgaccgccaccaaaagatattggttgggaggactatttgagacattcaaccccgagagtgagtaaaccaggtagaaataaaaactttttcgaagggtcctcggagggtcgtggcagtcttttgacttgcggtgatgtagaagagaaccctggctaacctaggctgctgccaccgctgagcaataactagcataaccccttggggcctctaaacgggtcttgaggggttttttgctgaaacctcaggcatttgagaagcacacggtcacactgcttccggtagtcaataaaccggtaaaccagcaatagacataagcggctatttaacgaccctgccctgaaccgacgacaagctgacgaccgggtctccgcaagtggcacttttcggggaaatgtgcgcggaacccctatttgtttatttttctaaatacattcaaatatgtatccgctcatgaattaattcttagaaaaactcatcgagcatcaaatgaaactgcaatttattcatatcaggattatcaataccatatttttgaaaaagccgtttctgtaatgaaggagaaaactcaccgaggcagttccataggatggcaagatcctggtatcggtctgcgattccgactcgtccaacatcaatacaacctattaatttcccctcgtcaaaaataaggttatcaagtgagaaatcaccatgagtgacgactgaatccggtgagaatggcaaaagtttatgcatttctttccagacttgttcaacaggccagccattacgctcgtcatcaaaatcactcgcatcaaccaaaccgttattcattcgtgattgcgcctgagcgagacgaaatacgcggtcgctgttaaaaggacaattacaaacaggaatcgaatgcaaccggcgcaggaacactgccagcgcatcaacaatattttcacctgaatcaggatattcttctaatacctggaatgctgttttcccggggatcgcagtggtgagtaaccatgcatcatcaggagtacggataaaatgcttgatggtcggaagaggcataaattccgtcagccagtttagtctgaccatctcatctgtaacatcattggcaacgctacctttgccatgtttcagaaacaactctggcgcatcgggcttcccatacaatcgatagattgtcgcacctgattgcccgacattatcgcgagcccatttatacccatataaatcagcatccatgttggaatttaatcgcggcctagagcaagacgtttcccgttgaatatggctcatactcttcctttttcaatattattgaagcatttatcagggttattgtctcatgagcggatacatatttgaatgtatttagaaaaataaacaaataggcatgctagcgcagaaacgtcctagaagatgccaggaggatacttagcagagagacaataaggccggagcgaagccgtttttccataggctccgcccccctgacgaacatcacgaaatctgacgctcaaatcagtggtggcgaaacccgacaggactataaagataccaggcgtttccccctgatggctccctcttgcgctctcctgttcccgtcctgcggcgtccgtgttgtggtggaggctttacccaaatcaccacgtcccgttccgtgtagacagttcgctccaagctgggctgtgtgcaagaaccccccgttcagcccgactgctgcgccttatccggtaactatcatcttgagtccaacccggaaagacacgacaaaacgccactggcagcagccattggtaactgagaattagtggatttagatatcgagagtcttgaagtggtggcctaacagaggctacactgaaaggacagtatttggtatctgcgctccactaaagccagttaccaggttaagcagttccccaactgacttaaccttcgatcaaaccgcctccccaggcggttttttcgtttacagagcaggagattacgacgatcgtaaaaggatctcaagaagatcctttacggattcccgacaccatcactctagat

SEQ ID NO: 82 - DNA, 6860 bp, synthetic construct
  source 1..6860: mol_type = other DNA
ttcagtgcaatttatctcttcaaatgtagcacctgaagtcagccccatacgatataagttgtaattctcatgttagtcatgccccgcgcccaccggaaggagctgactgggttgaaggctctcaagggcatcggtcgagatcccggtgcctaatgagtgagctaacttacattaattgcgttgcgctcactgcccgctttccagtcgggaaacctgtcgtgccagctgcattaatgaatcggccaacgcgcggggagaggcggtttgcgtattgggcgccagggtggtttttcttttcaccagtgagacgggcaacagctgattgcccttcaccgcctggccctgagagagttgcagcaagcggtccacgctggtttgccccagcaggcgaaaatcctgtttgatggtggttaacggcgggatataacatgagctgtcttcggtatcgtcgtatcccactaccgagatgtccgcaccaacgcgcagcccggactcggtaatggcgcgcattgcgcccagcgccatctgatcgttggcaaccagcatcgcagtgggaacgatgccctcattcagcatttgcatggtttgttgaaaaccggacatggcactccagtcgccttcccgttccgctatcggctgaatttgattgcgagtgagatatttatgccagccagccagacgcagacgcgccgagacagaacttaatgggcccgctaacagcgcgatttgctggtgacccaatgcgaccagatgctccacgcccagtcgcgtaccgtcttcatgggagaaaataatactgttgatgggtgtctggtcagagacatcaagaaataacgccggaacattagtgcaggcagcttccacagcaatggcatcctggtcatccagcggatagttaatgatcagcccactgacgcgttgcgcgagaagattgtgcaccgccgctttacaggcttcgacgccgcttcgttctaccatcgacaccaccacgctggcacccagttgatcggcgcgagatttaatcgccgcgacaatttgcgacggcgcgtgcagggccagactggaggtggcaacgccaatcagcaacgactgtttgcccgccagttgttgtgccacgcggttgggaatgtaattcagctccgccatcgccgcttccactttttcccgcgttttcgcagaaacgtggctggcctggttcaccacgcgggaaacggtctgataagagacaccggcatactctgcgacatcgtataacgttactggtttcacattcaccaccctgaattgactctcttccgggcgctatcatgccataccgcgaaaggttttgcgccattcgatggtgtccgggatctcgacgctctcccttatgcgactcctgcattaggaaattaatacgactcactataggggaattgtgagcggataacaattcccctgtagaaataattttgtttaactttaataaggagatataccatggcgacaagtttacctacgccctcagcaattacgacttcggcgttagagtatgcattccatactcccgctcgcaatctaacgaaatctcgcggaaaaaacattcatcgttatgtcagtgtaaagatgagtaagaggattacggtagaatctactctagagtgtgatgcctgctatcactttgattttgagccaagtattgttcgcttttgcgctcaaccgattcgatttttatattatctcaatggtcagtctcactcctatgttcctgactttctagttcaatttgataccaacgagtttgttctatatgaagtaaagtcagcttatgctaagaacaaacctgattttgatgttgaatgggaggcgaaagtaaaagcagcaactgaactagggctagaattggagcttgttgaagagagtgatattagggatacggttgtattaaataatcttaagcgcatgcatcgttatgcttcgaaagatgagctgaataacgtacataactctctcttaaaaataataaagtacaatggcgcccaatctgcaagatgcttgggagaacagttgggtttaaaaggccgaactgttttaccaattttgtgcgatttgctgtcaaggtgtttactcgatacacgtttggataagcctctatctcttgaatctcgatttgagttggccagttatggcgctaagaaagggttctcaagtttccatagaaaagcagtctcttcccaagatacgcttgaatcgatagagcttgtctctagcgctaattgtctagaaagtgttacgtatcaagatatatcagcatttcccgaaacaattgcggtagagattaatttccgattaagcattcttcgctttttagcgcgaaagtgcgaaaccattgtggccaaatcaattgaaccacatcgtgtagagctacagcaaaactatagtagaaaaatacccagtgcaataacgatatatcgatggtggcttgcttttcgaaaatcagactacaaccccattagcttagcacctaatatcaaggatagaggtaatagagagacaaaagtgtcaacagttgttgattctattatggaacaggcagttgaaagagttatatctggacgaaaagtcaatgttagctctgcatataaacgtgttcgacgaaaagttcgtcaatacaatctaactcatggaacgaaatacacgtatcctaagtacgaatctgtaagaaagcgagtaaaaaagaaaaccccatttgagttattagccgcagggaaaggggagagagtagctaagagagagtttcgccgaatgggaaaaaagatcctcacgtctagcgtgctagagagggttgaaatagatcacactgtcgttgacctttttgcagtacacgaagagtatcgaatcccattgggccgaccttggcttactcaattggttgattgttacagtaaagctgtaatcggtttttatttaggtttcgagcctcctagctatgtgtcggtttcccttgcacttaagaatgcaatacaacgcaaagatgacttaatctcctcgtatgaatcgatcgagaatgaatggctatgttatggcatcccagacctactcgtaactgataatggtaaagagtttttgtcgaaagcatttgatcaagcatgtgaatcactattgatcaatgtgcatcaaaataaagttgagacgcccgacaacaaacctcatgttgaacgtaactacgggactattaatacttctctgttagacgatttacctgggaaatccttcagccagtaccttcaaagagaagggtacgactctgtgggagaagctacccttacactcaatgagattagagaaatttacttaatttggttggtggatatttatcataaaaaacccaatcagagaggcactaattgtcctaatgttgcgtggaaaaagggttgtcaagaatgggaaccagaggagttctctggttctaaagacgaattagactttaaatttgctattgttgattacaaacaacttactaaagtagggataactgtctacaaagaactgagttatagcaatgaccgtttagctgaatatagagggaagaaaggaaaccataaagttcagttcaagtataaccctgagtgtatggcagttatttgggtgttggatgaggatatgaatgagtactttacagttaatgcgattgactacgaatatgcaagtagagtatcactttggcaacataaatataacatgaaatatcaagcagaactaaattcagcagaatatgatgaggacaaggaaattgatgcagaaataaaaattgaagaaatcgcagatcgttcaattgttaagactaacaaaatcagagctcggaggcgtggcgctaggcatcaagagaatagcgcaagggctaagtcaatcagtaatgcgaacccggcctcgatacaaaaacatgaagatgaaatcgttagtgcagataatgacgattgggatattgattatgtctgagaaatcgtcaaatgagtgaaacgcgtgaggctcgtatatcaagagctaaaagggcatttgtatccacaccgagcgttaggaaaatcttgagttacatggatagatgtagagatctatcagacctagagtctgagcctacatgcatgatggtctatggtgcttcgggtgtaggtaaaacgaccgtcatcaagaaatacttaaatcaaaacagaagagagtccgaagccgggggcgatataataccggttttgcatattgagttgccagacaatgcgaagccagtagatgcagcaagggaattgctggttgaaatgggtgacccgctagcactttatgaaactgacttagctagattgacgaaaagactgactgaattaatccctgcggtcggcgtgaagctgattattatcgatgagttccaacatttggtggaagaaaggtcaaatcgggttcttacccaagtaggtaattggctaaaaatgatacttaacaaaacgaaatgtccaattgttatatttggtatgccatactcaaaagttgtactgcaagcaaactcgcaacttcacgggcgattttccattcaggttgaactgcgcccctttagctaccagggaggtagaggtgtatttaaaacttttttggaataccttgataaagccctaccttttgaaaaacaggctggcttagccaacgaaagtttgcagaaaaaattgtatgcattctctcagggaaacatgcgttcgttgagaaaccttatttatcaagcatctatcgaagcaattgataatcagcatgagacgataaccgaagaagatttcgtttttgcatcgaagttgacatcgggcgataaacccaactcatggaaaaatccttttgaggagggtgttgaggtaacagaagatatgttacgaccgccaccaaaagatattggttgggaggactatttgagacattcaaccccgagagtgagtaaaccaggtagaaataaaaactttttcgaataacctaggctgctgccaccgctgagcaataactagcataaccccttggggcctctaaacgggtcttgaggggttttttgctgaaacctcaggcatttgagaagcacacggtcacactgcttccggtagtcaataaaccggtaaaccagcaatagacataagcggctatttaacgaccctgccctgaaccgacgacaagctgacgaccgggtctccgcaagtggcacttttcggggaaatgtgcgcggaacccctatttgtttatttttctaaatacattcaaatatgtatccgctcatgaattaattcttagaaaaactcatcgagcatcaaatgaaactgcaatttattcatatcaggattatcaataccatatttttgaaaaagccgtttctgtaatgaaggagaaaactcaccgaggcagttccataggatggcaagatcctggtatcggtctgcgattccgactcgtccaacatcaatacaacctattaatttcccctcgtcaaaaataaggttatcaagtgagaaatcaccatgagtgacgactgaatccggtgagaatggcaaaagtttatgcatttctttccagacttgttcaacaggccagccattacgctcgtcatcaaaatcactcgcatcaaccaaaccgttattcattcgtgattgcgcctgagcgagacgaaatacgcggtcgctgttaaaaggacaattacaaacaggaatcgaatgcaaccggcgcaggaacactgccagcgcatcaacaatattttcacctgaatcaggatattcttctaatacctggaatgctgttttcccggggatcgcagtggtgagtaaccatgcatcatcaggagtacggataaaatgcttgatggtcggaagaggcataaattccgtcagccagtttagtctgaccatctcatctgtaacatcattggcaacgctacctttgccatgtttcagaaacaactctggcgcatcgggcttcccatacaatcgatagattgtcgcacctgattgcccgacattatcgcgagcccatttatacccatataaatcagcatccatgttggaatttaatcgcggcctagagcaagacgtttcccgttgaatatggctcatactcttcctttttcaatattattgaagcatttatcagggttattgtctcatgagcggatacatatttgaatgtatttagaaaaataaacaaataggcatgctagcgcagaaacgtcctagaagatgccaggaggatacttagcagagagacaataaggccggagcgaagccgtttttccataggctccgcccccctgacgaacatcacgaaatctgacgctcaaatcagtggtggcgaaacccgacaggactataaagataccaggcgtttccccctgatggctccctcttgcgctctcctgttcccgtcctgcggcgtccgtgttgtggtggaggctttacccaaatcaccacgtcccgttccgtgtagacagttcgctccaagctgggctgtgtgcaagaaccccccgttcagcccgactgctgcgccttatccggtaactatcatcttgagtccaacccggaaagacacgacaaaacgccactggcagcagccattggtaactgagaattagtggatttagatatcgagagtcttgaagtggtggcctaacagaggctacactgaaaggacagtatttggtatctgcgctccactaaagccagttaccaggttaagcagttccccaactgacttaaccttcgatcaaaccgcctccccaggcggttttttcgtttacagagcaggagattacgacgatcgtaaaaggatctcaagaagatcctttacggattcccgacaccatcactctagat

SEQ ID NO: 83 - DNA, 6896 bp, synthetic construct
  source 1..6896: mol_type = other DNA
ttcagtgcaatttatctcttcaaatgtagcacctgaagtcagccccatacgatataagttgtaattctcatgttagtcatgccccgcgcccaccggaaggagctgactgggttgaaggctctcaagggcatcggtcgagatcccggtgcctaatgagtgagctaacttacattaattgcgttgcgctcactgcccgctttccagtcgggaaacctgtcgtgccagctgcattaatgaatcggccaacgcgcggggagaggcggtttgcgtattgggcgccagggtggtttttcttttcaccagtgagacgggcaacagctgattgcccttcaccgcctggccctgagagagttgcagcaagcggtccacgctggtttgccccagcaggcgaaaatcctgtttgatggtggttaacggcgggatataacatgagctgtcttcggtatcgtcgtatcccactaccgagatgtccgcaccaacgcgcagcccggactcggtaatggcgcgcattgcgcccagcgccatctgatcgttggcaaccagcatcgcagtgggaacgatgccctcattcagcatttgcatggtttgttgaaaaccggacatggcactccagtcgccttcccgttccgctatcggctgaatttgattgcgagtgagatatttatgccagccagccagacgcagacgcgccgagacagaacttaatgggcccgctaacagcgcgatttgctggtgacccaatgcgaccagatgctccacgcccagtcgcgtaccgtcttcatgggagaaaataatactgttgatgggtgtctggtcagagacatcaagaaataacgccggaacattagtgcaggcagcttccacagcaatggcatcctggtcatccagcggatagttaatgatcagcccactgacgcgttgcgcgagaagattgtgcaccgccgctttacaggcttcgacgccgcttcgttctaccatcgacaccaccacgctggcacccagttgatcggcgcgagatttaatcgccgcgacaatttgcgacggcgcgtgcagggccagactggaggtggcaacgccaatcagcaacgactgtttgcccgccagttgttgtgccacgcggttgggaatgtaattcagctccgccatcgccgcttccactttttcccgcgttttcgcagaaacgtggctggcctggttcaccacgcgggaaacggtctgataagagacaccggcatactctgcgacatcgtataacgttactggtttcacattcaccaccctgaattgactctcttccgggcgctatcatgccataccgcgaaaggttttgcgccattcgatggtgtccgggatctcgacgctctcccttatgcgactcctgcattaggaaattaatacgactcactataggggaattgtgagcggataacaattcccctgtagaaataattttgtttaactttaataaggagatataccatggggcctaagaaaaagcggaaggtgggttccggaatggcgacaagtttacctacgccctcagcaattacgacttcggcgttagagtatgcattccatactcccgctcgcaatctaacgaaatctcgcggaaaaaacattcatcgttatgtcagtgtaaagatgagtaagaggattacggtagaatctactctagagtgtgatgcctgctatcactttgattttgagccaagtattgttcgcttttgcgctcaaccgattcgatttttatattatctcaatggtcagtctcactcctatgttcctgactttctagttcaatttgataccaacgagtttgttctatatgaagtaaagtcagcttatgctaagaacaaacctgattttgatgttgaatgggaggcgaaagtaaaagcagcaactgaactagggctagaattggagcttgttgaagagagtgatattagggatacggttgtattaaataatcttaagcgcatgcatcgttatgcttcgaaagatgagctgaataacgtacataactctctcttaaaaataataaagtacaatggcgcccaatctgcaagatgcttgggagaacagttgggtttaaaaggccgaactgttttaccaattttgtgcgatttgctgtcaaggtgtttactcgatacacgtttggataagcctctatctcttgaatctcgatttgagttggccagttatggcgctaagaaagggttctcaagtttccatagaaaagcagtctcttcccaagatacgcttgaatcgatagagcttgtctctagcgctaattgtctagaaagtgttacgtatcaagatatatcagcatttcccgaaacaattgcggtagagattaatttccgattaagcattcttcgctttttagcgcgaaagtgcgaaaccattgtggccaaatcaattgaaccacatcgtgtagagctacagcaaaactatagtagaaaaatacccagtgcaataacgatatatcgatggtggcttgcttttcgaaaatcagactacaaccccattagcttagcacctaatatcaaggatagaggtaatagagagacaaaagtgtcaacagttgttgattctattatggaacaggcagttgaaagagttatatctggacgaaaagtcaatgttagctctgcatataaacgtgttcgacgaaaagttcgtcaatacaatctaactcatggaacgaaatacacgtatcctaagtacgaatctgtaagaaagcgagtaaaaaagaaaaccccatttgagttattagccgcagggaaaggggagagagtagctaagagagagtttcgccgaatgggaaaaaagatcctcacgtctagcgtgctagagagggttgaaatagatcacactgtcgttgacctttttgcagtacacgaagagtatcgaatcccattgggccgaccttggcttactcaattggttgattgttacagtaaagctgtaatcggtttttatttaggtttcgagcctcctagctatgtgtcggtttcccttgcacttaagaatgcaatacaacgcaaagatgacttaatctcctcgtatgaatcgatcgagaatgaatggctatgttatggcatcccagacctactcgtaactgataatggtaaagagtttttgtcgaaagcatttgatcaagcatgtgaatcactattgatcaatgtgcatcaaaataaagttgagacgcccgacaacaaacctcatgttgaacgtaactacgggactattaatacttctctgttagacgatttacctgggaaatccttcagccagtaccttcaaagagaagggtacgactctgtgggagaagctacccttacactcaatgagattagagaaatttacttaatttggttggtggatatttatcataaaaaacccaatcagagaggcactaattgtcctaatgttgcgtggaaaaagggttgtcaagaatgggaaccagaggagttctctggttctaaagacgaattagactttaaatttgctattgttgattacaaacaacttactaaagtagggataactgtctacaaagaactgagttatagcaatgaccgtttagctgaatatagagggaagaaaggaaaccataaagttcagttcaagtataaccctgagtgtatggcagttatttgggtgttggatgaggatatgaatgagtactttacagttaatgcgattgactacgaatatgcaagtagagtatcactttggcaacataaatataacatgaaatatcaagcagaactaaattcagcagaatatgatgaggacaaggaaattgatgcagaaataaaaattgaagaaatcgcagatcgttcaattgttaagactaacaaaatcagagctcggaggcgtggcgctaggcatcaagagaatagcgcaagggctaagtcaatcagtaatgcgaacccggcctcgatacaaaaacatgaagatgaaatcgttagtgcagataatgacgattgggatattgattatgtctgagaaatcgtcaaatgagtgaaacgcgtgaggctcgtatatcaagagctaaaagggcatttgtatccacaccgagcgttaggaaaatcttgagttacatggatagatgtagagatctatcagacctagagtctgagcctacatgcatgatggtctatggtgcttcgggtgtaggtaaaacgaccgtcatcaagaaatacttaaatcaaaacagaagagagtccgaagccgggggcgatataataccggttttgcatattgagttgccagacaatgcgaagccagtagatgcagcaagggaattgctggttgaaatgggtgacccgctagcactttatgaaactgacttagctagattgacgaaaagactgactgaattaatccctgcggtcggcgtgaagctgattattatcgatgagttccaacatttggtggaagaaaggtcaaatcgggttcttacccaagtaggtaattggctaaaaatgatacttaacaaaacgaaatgtccaattgttatatttggtatgccatactcaaaagttgtactgcaagcaaactcgcaacttcacgggcgattttccattcaggttgaactgcgcccctttagctaccagggaggtagaggtgtatttaaaacttttttggaataccttgataaagccctaccttttgaaaaacaggctggcttagccaacgaaagtttgcagaaaaaattgtatgcattctctcagggaaacatgcgttcgttgagaaaccttatttatcaagcatctatcgaagcaattgataatcagcatgagacgataaccgaagaagatttcgtttttgcatcgaagttgacatcgggcgataaacccaactcatggaaaaatccttttgaggagggtgttgaggtaacagaagatatgttacgaccgccaccaaaagatattggttgggaggactatttgagacattcaaccccgagagtgagtaaaccaggtagaaataaaaactttttcgaataacctaggctgctgccaccgctgagcaataactagcataaccccttggggcctctaaacgggtcttgaggggttttttgctgaaacctcaggcatttgagaagcacacggtcacactgcttccggtagtcaataaaccggtaaaccagcaatagacataagcggctatttaacgaccctgccctgaaccgacgacaagctgacgaccgggtctccgcaagtggcacttttcggggaaatgtgcgcggaacccctatttgtttatttttctaaatacattcaaatatgtatccgctcatgaattaattcttagaaaaactcatcgagcatcaaatgaaactgcaatttattcatatcaggattatcaataccatatttttgaaaaagccgtttctgtaatgaaggagaaaactcaccgaggcagttccataggatggcaagatcctggtatcggtctgcgattccgactcgtccaacatcaatacaacctattaatttcccctcgtcaaaaataaggttatcaagtgagaaatcaccatgagtgacgactgaatccggtgagaatggcaaaagtttatgcatttctttccagacttgttcaacaggccagccattacgctcgtcatcaaaatcactcgcatcaaccaaaccgttattcattcgtgattgcgcctgagcgagacgaaatacgcggtcgctgttaaaaggacaattacaaacaggaatcgaatgcaaccggcgcaggaacactgccagcgcatcaacaatattttcacctgaatcaggatattcttctaatacctggaatgctgttttcccggggatcgcagtggtgagtaaccatgcatcatcaggagtacggataaaatgcttgatggtcggaagaggcataaattccgtcagccagtttagtctgaccatctcatctgtaacatcattggcaacgctacctttgccatgtttcagaaacaactctggcgcatcgggcttcccatacaatcgatagattgtcgcacctgattgcccgacattatcgcgagcccatttatacccatataaatcagcatccatgttggaatttaatcgcggcctagagcaagacgtttcccgttgaatatggctcatactcttcctttttcaatattattgaagcatttatcagggttattgtctcatgagcggatacatatttgaatgtatttagaaaaataaacaaataggcatgctagcgcagaaacgtcctagaagatgccaggaggatacttagcagagagacaataaggccggagcgaagccgtttttccataggctccgcccccctgacgaacatcacgaaatctgacgctcaaatcagtggtggcgaaacccgacaggactataaagataccaggcgtttccccctgatggctccctcttgcgctctcctgttcccgtcctgcggcgtccgtgttgtggtggaggctttacccaaatcaccacgtcccgttccgtgtagacagttcgctccaagctgggctgtgtgcaagaaccccccgttcagcccgactgctgcgccttatccggtaactatcatcttgagtccaacccggaaagacacgacaaaacgccactggcagcagccattggtaactgagaattagtggatttagatatcgagagtcttgaagtggtggcctaacagaggctacactgaaaggacagtatttggtatctgcgctccactaaagccagttaccaggttaagcagttccccaactgacttaaccttcgatcaaaccgcctccccaggcggttttttcgtttacagagcaggagattacgacgatcgtaaaaggatctcaagaagatcctttacggattcccgacaccatcactctagat

SEQ ID NO: 84 - DNA, 6947 bp, synthetic construct
  source 1..6947: mol_type = other DNA
ttcagtgcaatttatctcttcaaatgtagcacctgaagtcagccccatacgatataagttgtaattctcatgttagtcatgccccgcgcccaccggaaggagctgactgggttgaaggctctcaagggcatcggtcgagatcccggtgcctaatgagtgagctaacttacattaattgcgttgcgctcactgcccgctttccagtcgggaaacctgtcgtgccagctgcattaatgaatcggccaacgcgcggggagaggcggtttgcgtattgggcgccagggtggtttttcttttcaccagtgagacgggcaacagctgattgcccttcaccgcctggccctgagagagttgcagcaagcggtccacgctggtttgccccagcaggcgaaaatcctgtttgatggtggttaacggcgggatataacatgagctgtcttcggtatcgtcgtatcccactaccgagatgtccgcaccaacgcgcagcccggactcggtaatggcgcgcattgcgcccagcgccatctgatcgttggcaaccagcatcgcagtgggaacgatgccctcattcagcatttgcatggtttgttgaaaaccggacatggcactccagtcgccttcccgttccgctatcggctgaatttgattgcgagtgagatatttatgccagccagccagacgcagacgcgccgagacagaacttaatgggcccgctaacagcgcgatttgctggtgacccaatgcgaccagatgctccacgcccagtcgcgtaccgtcttcatgggagaaaataatactgttgatgggtgtctggtcagagacatcaagaaataacgccggaacattagtgcaggcagcttccacagcaatggcatcctggtcatccagcggatagttaatgatcagcccactgacgcgttgcgcgagaagattgtgcaccgccgctttacaggcttcgacgccgcttcgttctaccatcgacaccaccacgctggcacccagttgatcggcgcgagatttaatcgccgcgacaatttgcgacggcgcgtgcagggccagactggaggtggcaacgccaatcagcaacgactgtttgcccgccagttgttgtgccacgcggttgggaatgtaattcagctccgccatcgccgcttccactttttcccgcgttttcgcagaaacgtggctggcctggttcaccacgcgggaaacggtctgataagagacaccggcatactctgcgacatcgtataacgttactggtttcacattcaccaccctgaattgactctcttccgggcgctatcatgccataccgcgaaaggttttgcgccattcgatggtgtccgggatctcgacgctctcccttatgcgactcctgcattaggaaattaatacgactcactataggggaattgtgagcggataacaattcccctgtagaaataattttgtttaactttaataaggagatataccatggcgacaagtttacctacgccctcagcaattacgacttcggcgttagagtatgcattccatactcccgctcgcaatctaacgaaatctcgcggaaaaaacattcatcgttatgtcagtgtaaagatgagtaagaggattacggtagaatctactctagagtgtgatgcctgctatcactttgattttgagccaagtattgttcgcttttgcgctcaaccgattcgatttttatattatctcaatggtcagtctcactcctatgttcctgactttctagttcaatttgataccaacgagtttgttctatatgaagtaaagtcagcttatgctaagaacaaacctgattttgatgttgaatgggaggcgaaagtaaaagcagcaactgaactagggctagaattggagcttgttgaagagagtgatattagggatacggttgtattaaataatcttaagcgcatgcatcgttatgcttcgaaagatgagctgaataacgtacataactctctcttaaaaataataaagtacaatggcgcccaatctgcaagatgcttgggagaacagttgggtttaaaaggccgaactgttttaccaattttgtgcgatttgctgtcaaggtgtttactcgatacacgtttggataagcctctatctcttgaatctcgatttgagttggccagttatggcggcagcggctccggaaaacggacagccgacggaagcgagttcgagtcaccaaagaagaagcggaaagtcggatccggctctggaggcgctaagaaagggttctcaagtttccatagaaaagcagtctcttcccaagatacgcttgaatcgatagagcttgtctctagcgctaattgtctagaaagtgttacgtatcaagatatatcagcatttcccgaaacaattgcggtagagattaatttccgattaagcattcttcgctttttagcgcgaaagtgcgaaaccattgtggccaaatcaattgaaccacatcgtgtagagctacagcaaaactatagtagaaaaatacccagtgcaataacgatatatcgatggtggcttgcttttcgaaaatcagactacaaccccattagcttagcacctaatatcaaggatagaggtaatagagagacaaaagtgtcaacagttgttgattctattatggaacaggcagttgaaagagttatatctggacgaaaagtcaatgttagctctgcatataaacgtgttcgacgaaaagttcgtcaatacaatctaactcatggaacgaaatacacgtatcctaagtacgaatctgtaagaaagcgagtaaaaaagaaaaccccatttgagttattagccgcagggaaaggggagagagtagctaagagagagtttcgccgaatgggaaaaaagatcctcacgtctagcgtgctagagagggttgaaatagatcacactgtcgttgacctttttgcagtacacgaagagtatcgaatcccattgggccgaccttggcttactcaattggttgattgttacagtaaagctgtaatcggtttttatttaggtttcgagcctcctagctatgtgtcggtttcccttgcacttaagaatgcaatacaacgcaaagatgacttaatctcctcgtatgaatcgatcgagaatgaatggctatgttatggcatcccagacctactcgtaactgataatggtaaagagtttttgtcgaaagcatttgatcaagcatgtgaatcactattgatcaatgtgcatcaaaataaagttgagacgcccgacaacaaacctcatgttgaacgtaactacgggactattaatacttctctgttagacgatttacctgggaaatccttcagccagtaccttcaaagagaagggtacgactctgtgggagaagctacccttacactcaatgagattagagaaatttacttaatttggttggtggatatttatcataaaaaacccaatcagagaggcactaattgtcctaatgttgcgtggaaaaagggttgtcaagaatgggaaccagaggagttctctggttctaaagacgaattagactttaaatttgctattgttgattacaaacaacttactaaagtagggataactgtctacaaagaactgagttatagcaatgaccgtttagctgaatatagagggaagaaaggaaaccataaagttcagttcaagtataaccctgagtgtatggcagttatttgggtgttggatgaggatatgaatgagtactttacagttaatgcgattgactacgaatatgcaagtagagtatcactttggcaacataaatataacatgaaatatcaagcagaactaaattcagcagaatatgatgaggacaaggaaattgatgcagaaataaaaattgaagaaatcgcagatcgttcaattgttaagactaacaaaatcagagctcggaggcgtggcgctaggcatcaagagaatagcgcaagggctaagtcaatcagtaatgcgaacccggcctcgatacaaaaacatgaagatgaaatcgttagtgcagataatgacgattgggatattgattatgtctgagaaatcgtcaaatgagtgaaacgcgtgaggctcgtatatcaagagctaaaagggcatttgtatccacaccgagcgttaggaaaatcttgagttacatggatagatgtagagatctatcagacctagagtctgagcctacatgcatgatggtctatggtgcttcgggtgtaggtaaaacgaccgtcatcaagaaatacttaaatcaaaacagaagagagtccgaagccgggggcgatataataccggttttgcatattgagttgccagacaatgcgaagccagtagatgcagcaagggaattgctggttgaaatgggtgacccgctagcactttatgaaactgacttagctagattgacgaaaagactgactgaattaatccctgcggtcggcgtgaagctgattattatcgatgagttccaacatttggtggaagaaaggtcaaatcgggttcttacccaagtaggtaattggctaaaaatgatacttaacaaaacgaaatgtccaattgttatatttggtatgccatactcaaaagttgtactgcaagcaaactcgcaacttcacgggcgattttccattcaggttgaactgcgcccctttagctaccagggaggtagaggtgtatttaaaacttttttggaataccttgataaagccctaccttttgaaaaacaggctggcttagccaacgaaagtttgcagaaaaaattgtatgcattctctcagggaaacatgcgttcgttgagaaaccttatttatcaagcatctatcgaagcaattgataatcagcatgagacgataaccgaagaagatttcgtttttgcatcgaagttgacatcgggcgataaacccaactcatggaaaaatccttttgaggagggtgttgaggtaacagaagatatgttacgaccgccaccaaaagatattggttgggaggactatttgagacattcaaccccgagagtgagtaaaccaggtagaaataaaaactttttcgaataacctaggctgctgccaccgctgagcaataactagcataaccccttggggcctctaaacgggtcttgaggggttttttgctgaaacctcaggcatttgagaagcacacggtcacactgcttccggtagtcaataaaccggtaaaccagcaatagacataagcggctatttaacgaccctgccctgaaccgacgacaagctgacgaccgggtctccgcaagtggcacttttcggggaaatgtgcgcggaacccctatttgtttatttttctaaatacattcaaatatgtatccgctcatgaattaattcttagaaaaactcatcgagcatcaaatgaaactgcaatttattcatatcaggattatcaataccatatttttgaaaaagccgtttctgtaatgaaggagaaaactcaccgaggcagttccataggatggcaagatcctggtatcggtctgcgattccgactcgtccaacatcaatacaacctattaatttcccctcgtcaaaaataaggttatcaagtgagaaatcaccatgagtgacgactgaatccggtgagaatggcaaaagtttatgcatttctttccagacttgttcaacaggccagccattacgctcgtcatcaaaatcactcgcatcaaccaaaccgttattcattcgtgattgcgcctgagcgagacgaaatacgcggtcgctgttaaaaggacaattacaaacaggaatcgaatgcaaccggcgcaggaacactgccagcgcatcaacaatattttcacctgaatcaggatattcttctaatacctggaatgctgttttcccggggatcgcagtggtgagtaaccatgcatcatcaggagtacggataaaatgcttgatggtcggaagaggcataaattccgtcagccagtttagtctgaccatctcatctgtaacatcattggcaacgctacctttgccatgtttcagaaacaactctggcgcatcgggcttcccatacaatcgatagattgtcgcacctgattgcccgacattatcgcgagcccatttatacccatataaatcagcatccatgttggaatttaatcgcggcctagagcaagacgtttcccgttgaatatggctcatactcttcctttttcaatattattgaagcatttatcagggttattgtctcatgagcggatacatatttgaatgtatttagaaaaataaacaaataggcatgctagcgcagaaacgtcctagaagatgccaggaggatacttagcagagagacaataaggccggagcgaagccgtttttccataggctccgcccccctgacgaacatcacgaaatctgacgctcaaatcagtggtggcgaaacccgacaggactataaagataccaggcgtttccccctgatggctccctcttgcgctctcctgttcccgtcctgcggcgtccgtgttgtggtggaggctttacccaaatcaccacgtcccgttccgtgtagacagttcgctccaagctgggctgtgtgcaagaaccccccgttcagcccgactgctgcgccttatccggtaactatcatcttgagtccaacccggaaagacacgacaaaacgccactggcagcagccattggtaactgagaattagtggatttagatatcgagagtcttgaagtggtggcctaacagaggctacactgaaaggacagtatttggtatctgcgctccactaaagccagttaccaggttaagcagttccccaactgacttaaccttcgatcaaaccgcctccccaggcggttttttcgtttacagagcaggagattacgacgatcgtaaaaggatctcaagaagatcctttacggattcccgacaccatcactctagat

SEQ ID NO: 85 - DNA, 6890 bp, synthetic construct
  source 1..6890: mol_type = other DNA
ttcagtgcaatttatctcttcaaatgtagcacctgaagtcagccccatacgatataagttgtaattctcatgttagtcatgccccgcgcccaccggaaggagctgactgggttgaaggctctcaagggcatcggtcgagatcccggtgcctaatgagtgagctaacttacattaattgcgttgcgctcactgcccgctttccagtcgggaaacctgtcgtgccagctgcattaatgaatcggccaacgcgcggggagaggcggtttgcgtattgggcgccagggtggtttttcttttcaccagtgagacgggcaacagctgattgcccttcaccgcctggccctgagagagttgcagcaagcggtccacgctggtttgccccagcaggcgaaaatcctgtttgatggtggttaacggcgggatataacatgagctgtcttcggtatcgtcgtatcccactaccgagatgtccgcaccaacgcgcagcccggactcggtaatggcgcgcattgcgcccagcgccatctgatcgttggcaaccagcatcgcagtgggaacgatgccctcattcagcatttgcatggtttgttgaaaaccggacatggcactccagtcgccttcccgttccgctatcggctgaatttgattgcgagtgagatatttatgccagccagccagacgcagacgcgccgagacagaacttaatgggcccgctaacagcgcgatttgctggtgacccaatgcgaccagatgctccacgcccagtcgcgtaccgtcttcatgggagaaaataatactgttgatgggtgtctggtcagagacatcaagaaataacgccggaacattagtgcaggcagcttccacagcaatggcatcctggtcatccagcggatagttaatgatcagcccactgacgcgttgcgcgagaagattgtgcaccgccgctttacaggcttcgacgccgcttcgttctaccatcgacaccaccacgctggcacccagttgatcggcgcgagatttaatcgccgcgacaatttgcgacggcgcgtgcagggccagactggaggtggcaacgccaatcagcaacgactgtttgcccgccagttgttgtgccacgcggttgggaatgtaattcagctccgccatcgccgcttccactttttcccgcgttttcgcagaaacgtggctggcctggttcaccacgcgggaaacggtctgataagagacaccggcatactctgcgacatcgtataacgttactggtttcacattcaccaccctgaattgactctcttccgggcgctatcatgccataccgcgaaaggttttgcgccattcgatggtgtccgggatctcgacgctctcccttatgcgactcctgcattaggaaattaatacgactcactataggggaattgtgagcggataacaattcccctgtagaaataattttgtttaactttaataaggagatataccatggcgacaagtttacctacgccctcagcaattacgacttcggcgttagagtatgcattccatactcccgctcgcaatctaacgaaatctcgcggaaaaaacattcatcgttatgtcagtgtaaagatgagtaagaggattacggtagaatctactctagagtgtgatgcctgctatcactttgattttgagccaagtattgttcgcttttgcgctcaaccgattcgatttttatattatctcaatggtcagtctcactcctatgttcctgactttctagttcaatttgataccaacgagtttgttctatatgaagtaaagtcagcttatgctaagaacaaacctgattttgatgttgaatgggaggcgaaagtaaaagcagcaactgaactagggctagaattggagcttgttgaagagagtgatattagggatacggttgtattaaataatcttaagcgcatgcatcgttatgcttcgaaagatgagctgaataacgtacataactctctcttaaaaataataaagtacaatggcgcccaatctgcaagatgcttgggagaacagttgggtttaaaaggccgaactgttttaccaattttgtgcgatttgctgtcaaggtgtttactcgatacacgtttggataagcctctatctcttgaatctcgatttgagttggccagttatggcgctaagaaagggttctcaagtttccatagaaaagcagtctcttcccaagatacgcttgaatcgatagagcttgtctctagcgctaattgtctagaaagtgttacgtatcaagatatatcagcatttcccgaaacaattgcggtagagattaatttccgattaagcattcttcgctttttagcgcgaaagtgcgaaaccattgtggccaaatcaattgaaccacatcgtgtagagctacagcaaaactatagtagaaaaatacccagtgcaataacgatatatcgatggtggcttgcttttcgaaaatcagactacaaccccattagcttagcacctaatatcaaggatagaggtaatagagagacaaaagtgtcaacagttgttgattctattatggaacaggcagttgaaagagttatatctggacgaaaagtcaatgttagctctgcatataaacgtgttcgacgaaaagttcgtcaatacaatctaactcatggaacgaaatacacgtatcctaagtacgaatctgtaagaaagcgagtaaaaaagaaaaccccatttgagttattagccgcagggaaaggggagagagtagctaagagagagtttcgccgaatgggaaaaaagatcctcacgtctagcgtgctagagagggttgaaatagatcacactgtcgttgacctttttgcagtacacgaagagtatcgaatcccattgggccgaccttggcttactcaattggttgattgttacagtaaagctgtaatcggtttttatttaggtttcgagcctcctagctatgtgtcggtttcccttgcacttaagaatgcaatacaacgcaaagatgacttaatctcctcgtatgaatcgatcgagaatgaatggctatgttatggcatcccagacctactcgtaactgataatggtaaagagtttttgtcgaaagcatttgatcaagcatgtgaatcactattgatcaatgtgcatcaaaataaagttgagacgcccgacaacaaacctcatgttgaacgtaactacgggactattaatacttctctgttagacgatttacctgggaaatccttcagccagtaccttcaaagagaagggtacgactctgtgggagaagctacccttacactcaatgagattagagaaatttacttaatttggttggtggatatttatcataaaaaacccaatcagagaggcactaattgtcctaatgttgcgtggaaaaagggttgtcaagaatgggaaccagaggagttctctggttctaaagacgaattagactttaaatttgctattgttgattacaaacaacttactaaagtagggataactgtctacaaagaactgagttatagcaatgaccgtttagctgaatatagagggaagaaaggaaaccataaagttcagttcaagtataaccctgagtgtatggcagttatttgggtgttggatgaggatatgaatgagtactttacagttaatgcgattgactacgaatatgcaagtagagtatcactttggcaacataaatataacatgaaatatcaagcagaactaaattcagcagaatatgatgaggacaaggaaattgatgcagaaataaaaattgaagaaatcgcagatcgttcaattgttaagactaacaaaatcagagctcggaggcgtggcgctaggcatcaagagaatagcgcaagggctaagtcaatcagtaatgcgaacccggcctcgatacaaaaacatgaagatgaaatcgttagtgcagataatgacgattgggatattgattatgtcggttccggacccaagaaaaagcgcaaggtctgagaaatcgtcaaatgagtgaaacgcgtgaggctcgtatatcaagagctaaaagggcatttgtatccacaccgagcgttaggaaaatcttgagttacatggatagatgtagagatctatcagacctagagtctgagcctacatgcatgatggtctatggtgcttcgggtgtaggtaaaacgaccgtcatcaagaaatacttaaatcaaaacagaagagagtccgaagccgggggcgatataataccggttttgcatattgagttgccagacaatgcgaagccagtagatgcagcaagggaattgctggttgaaatgggtgacccgctagcactttatgaaactgacttagctagattgacgaaaagactgactgaattaatccctgcggtcggcgtgaagctgattattatcgatgagttccaacatttggtggaagaaaggtcaaatcgggttcttacccaagtaggtaattggctaaaaatgatacttaacaaaacgaaatgtccaattgttatatttggtatgccatactcaaaagttgtactgcaagcaaactcgcaacttcacgggcgattttccattcaggttgaactgcgcccctttagctaccagggaggtagaggtgtatttaaaacttttttggaataccttgataaagccctaccttttgaaaaacaggctggcttagccaacgaaagtttgcagaaaaaattgtatgcattctctcagggaaacatgcgttcgttgagaaaccttatttatcaagcatctatcgaagcaattgataatcagcatgagacgataaccgaagaagatttcgtttttgcatcgaagttgacatcgggcgataaacccaactcatggaaaaatccttttgaggagggtgttgaggtaacagaagatatgttacgaccgccaccaaaagatattggttgggaggactatttgagacattcaaccccgagagtgagtaaaccaggtagaaataaaaactttttcgaataacctaggctgctgccaccgctgagcaataactagcataaccccttggggcctctaaacgggtcttgaggggttttttgctgaaacctcaggcatttgagaagcacacggtcacactgcttccggtagtcaataaaccggtaaaccagcaatagacataagcggctatttaacgaccctgccctgaaccgacgacaagctgacgaccgggtctccgcaagtggcacttttcggggaaatgtgcgcggaacccctatttgtttatttttctaaatacattcaaatatgtatccgctcatgaattaattcttagaaaaactcatcgagcatcaaatgaaactgcaatttattcatatcaggattatcaataccatatttttgaaaaagccgtttctgtaatgaaggagaaaactcaccgaggcagttccataggatggcaagatcctggtatcggtctgcgattccgactcgtccaacatcaatacaacctattaatttcccctcgtcaaaaataaggttatcaagtgagaaatcaccatgagtgacgactgaatccggtgagaatggcaaaagtttatgcatttctttccagacttgttcaacaggccagccattacgctcgtcatcaaaatcactcgcatcaaccaaaccgttattcattcgtgattgcgcctgagcgagacgaaatacgcggtcgctgttaaaaggacaattacaaacaggaatcgaatgcaaccggcgcaggaacactgccagcgcatcaacaatattttcacctgaatcaggatattcttctaatacctggaatgctgttttcccggggatcgcagtggtgagtaaccatgcatcatcaggagtacggataaaatgcttgatggtcggaagaggcataaattccgtcagccagtttagtctgaccatctcatctgtaacatcattggcaacgctacctttgccatgtttcagaaacaactctggcgcatcgggcttcccatacaatcgatagattgtcgcacctgattgcccgacattatcgcgagcccatttatacccatataaatcagcatccatgttggaatttaatcgcggcctagagcaagacgtttcccgttgaatatggctcatactcttcctttttcaatattattgaagcatttatcagggttattgtctcatgagcggatacatatttgaatgtatttagaaaaataaacaaataggcatgctagcgcagaaacgtcctagaagatgccaggaggatacttagcagagagacaataaggccggagcgaagccgtttttccataggctccgcccccctgacgaacatcacgaaatctgacgctcaaatcagtggtggcgaaacccgacaggactataaagataccaggcgtttccccctgatggctccctcttgcgctctcctgttcccgtcctgcggcgtccgtgttgtggtggaggctttacccaaatcaccacgtcccgttccgtgtagacagttcgctccaagctgggctgtgtgcaagaaccccccgttcagcccgactgctgcgccttatccggtaactatcatcttgagtccaacccggaaagacacgacaaaacgccactggcagcagccattggtaactgagaattagtggatttagatatcgagagtcttgaagtggtggcctaacagaggctacactgaaaggacagtatttggtatctgcgctccactaaagccagttaccaggttaagcagttccccaactgacttaaccttcgatcaaaccgcctccccaggcggttttttcgtttacagagcaggagattacgacgatcgtaaaaggatctcaagaagatcctttacggattcccgacaccatcactctagat

SEQ ID NO: 86 - DNA, 11812 bp, synthetic construct
  source 1..11812: mol_type = other DNA
attcaccaccctgaattgactctcttccgggcgctatcatgccataccgcgaaaggttttgcgccattcgatggtgtccgggatctcgacgctctcccttatgcgactcctgcattaggaaattaatacgactcactataggggaattgtgagcggataacaattcccctgtagaaataattttgtttaactttaataaggagatataccatgggtgaactgccgagtaggtagctgataacgagacctctgtcttgtcagctagggtggtctcgtgaactgccgagtaggtagctgataacggatccgaattcgagcgaaggagatatacatatgtttttgcaaagacctaaaccttacagcgatgaaagtttagaaagtttctttatccgagtggctaacaaaaatggctacggtgatgtccatcgcttcctagaagccactaaacgattccttcaagacattgaccataatggctatcaaacctttccgactgatataactcggataaacccatactcagctaaaaacagttccagcgcacgaactgcgtcattcctgaaacttgcacaattgacatttaatgaaccgccagagctacttgggttggcaattaacagaacaaacatgaaatactcgccgtcaactagcgcggttgttagaggtgcagaagtctttcctcgcagtttactacggacgcactccatcccctgctgtcctttgtgtctgcgagaaaatggctacgcctcctacctttggcactttcaggggtacgaatactgccacagccataacgtacctttaattaccacttgtagctgtggtaaggagtttgactaccgagtatctgggttaaagggcatttgctgcaaatgcaaggagcctatcaccttaaccagcagggagaacggtcatgaggcagcgtgtactgtttcaaactggcttgctggccatgaatctaaacctctgccaaatcttcctaaaagctaccgatggggtttagttcattggtggatgggtattaaagatagcgagttcgatcacttttcgttcgttcaatttttctcaaactggccaaggtcattccactcgataatcgaagatgaagtagagttcaaccttgagcatgctgttgtcagcacgtctgaattacgactaaaagatcttcttggtcgattgtttttcggttcaattcggttacctgagcggaatcttcaacacaatatcatccttggtgagcttctctgctatttagaaaatcgtttatggcaagacaagggattaatcgccaacctcaaaatgaacgcgttagaggcgactgtaatgttaaattgtagcctcgatcagattgcatcaatggttgaacaacgcatcttgaagccaaatcgaaaaagcaagcccaacagccctcttgatgttaccgattatctatttcatttcggcgatattttctgtctttggttagctgagttccaaagcgatgagtttaaccgttcgttttatgtgtcgaggtggtaaatgcaaactctgaaagaactaatcgcatccaatcctgacgacttaacaactgaacttaagagagcatttcgtccactcacaccgcatattgcaattgatggtaatgaacttgacgcactgacgatattagtcaatttaaccgataagactgatgatcagaaagacctgctcgatcgagccaaatgcaagcaaaaacttcgagatgaaaaatggtgggctagctgcataaattgcgttaattacagacaaagccataacccaaaattcccggatatacgttctgaaggcgtgattcgaacccaagccctgggtgaattaccgagtttcctactctcgtcctcaaaaatcccaccataccattggtcatatagccatgattcaaaatacgtcaacaaaagcgcattcctcaccaatgagttttgttgggatggtgagatctcatgtttgggtgagcttcttaaagatgcagatcacccactttggaatactttgaaaaagttaggttgttctcaaaaaacttgcaaagcaatggcaaaacaactagctgatattactctcacgactatcaatgtcacactcgcaccaaattacctgactcaaatatctctccccgatagtgatacatcctacatttcactctctcctgttgcatcgctatcgatgcaaagccactttcatcagaggctccaagatgaaaatcggcatagcgcgataacgcggtttagccgaactaccaacatgggggtcactgcgatgacatgtggcggcgcatttagaatgttaaagtctggcgctaagttttccagcccccctcatcaccgattaaacagtaaacgaagttggttgacgtcagagcatgttcagtcattaaaacagtaccagcgcctcaacaaaagcctcatacctgaaaactctcggattgcactccgtagaaaatacaaaatcgagcttcaaaatatggtcagatcttggtttgcaatgcaagaccatacccttgattcgaacatacttatccaacatttgaatcatgacctatcttacttaggagccacaaaacgttttgcatacgatccagcgatgaccaagctctttactgagcttttgaaacgagagttatcaaattcaatcaataatggtgagcaacacactaatggatcgtttttagtcctaccgaatatcagggtttgtggcgcaacagctttaagctccccggtaacggtggggattccatcacttacagctttctttggcttcgttcacgcatttgaacggaatataaatcgcaccacctcatcgtttcgtgttgaatcctttgcgatatgcgtccatcaactacatgtcgagaagcgaggtttgacagcagagtttgtggaaaaaggcgacgggactatatccgctcccgcgacccgggatgactggcagtgtgatgtcgtatttagccttattttgaacaccaactttgctcaacatattgaccaagatacgttagttacatcactaccaaagcgattggctcggggttcagcaaaaattgcgattgatgactttaaacatatcaactcattctcgacattagaaacagcgatcgaatctctgccaatagaagctggtaggtggttatcactttacgcacagtcaaacaataatctaagtgatctattagcagccatgacagaggaccatcagctcatggcaagctgcgtcggttaccacttgttagaagagcccaaagataaaccaaactccctcagaggttacaaacacgctatcgccgagtgcatcattggactcattaactcaatcacctttagctcagagactgatcccaacacaatcttttggtcgctaaagaactatcaaaactacctagtggtacagccaaggagtatcaacgatgaaactaccgacaaatctagcctatgagcgctctatcgacccatcagatgtctgtttttttgtcgtctggcccgatgatagaaaaacacctttaacctacaattctcgtactctgctcgggcaaatggaagcggcatcattagcctatgatgtctcaggtcaaccaataaaaagtgccaccgctgaggcgttagctcaagggaaccctcatcaagttgatttctgccacgttccatacggtgcgagtcatattgaatgcagtttctccgtctcgttttcttctgaactacgtcaaccatataagtgtaactcaagcaaagttaaacaaacgctagtgcaattagtcgagctctacgaaacgaaaatcggctggactgagctagcaacccgatatttgatgaacatttgcaacggtaaatggctgtggaaaaatacccgtaaagcctattgctggaacattgtacttacaccttggccttggaacggggaaaaggttggatttgaagatattcgtactaactacacctcacggcaagactttaaaaataataaaaattggtctgctatagttgaaatgatcaaaaccgcattttctagtactgatgggctggcgatatttgaagtcagggccaccttgcacttgccaacgaatgctatggtgcggccaagccaagttttcacagaaaaagaaagtggcagtaaaagtaaatctaaaactcaaaacagtcgagtttttcagagtacaactattgatggtgaacgatcgccaatactaggggcctttaaaacgggagcagctattgcaaccattgacgactggtatcctgaagccactgagccactaagggtcggacggtttggggttcatcgcgaagatgtcacttgctaccgtcatccgtctaccggaaaagattttttctcgatattacaacaagcagagcactatattgaagtgttgagcgccaacaaaactcccgctcaagaaactatcaacgacatgcactttttaatggctaacctgattaagggtgggatgttccagcataaaggagactgactgtgaaatggtattataagacaatcacctttctgccagagttgtgcaacaacgagtcactggctgcaaagtgtctccgcgttctgcatggatttaactatcagtatgagacacgaaatatcggcgtttcatttccgctttggtgtgatgcaacggttggaaaaaagatttcatttgtcagcaagaacaagatagaactcgacttactacttaaacaacactatttcgtccaaatggaacaacttcaatactttcatatatccaacactgttctcgtcccagaagattgtacatacgtttcctttagacgctgtcaatctatagataagctcacagcagcagggctggcaaggaaaatcagacgcctggagaaacgtgctctatctagaggcgagcaatttgacccatcatcttttgctcaaaaagagcatactgcaatagcgcactaccactcacttggggagtccagcaaacagacgaaccgcaactttcgactcaatatcaggatgctctcggagcaaccccgtgaggggaactcgatttttagtagctatggcttatcaaattcagaaaactcgtttcagcctgtacccttaatctgacctttaataaggagatataccatggcgacaagtttacctacgccctcagcaattacgacttcggcgttagagtatgcattccatactcccgctcgcaatctaacgaaatctcgcggaaaaaacattcatcgttatgtcagtgtaaagatgagtaagaggattacggtagaatctactctagagtgtgatgcctgctatcactttgattttgagccaagtattgttcgcttttgcgctcaaccgattcgatttttatattatctcaatggtcagtctcactcctatgttcctgactttctagttcaatttgataccaacgagtttgttctatatgaagtaaagtcagcttatgctaagaacaaacctgattttgatgttgaatgggaggcgaaagtaaaagcagcaactgaactagggctagaattggagcttgttgaagagagtgatattagggatacggttgtattaaataatcttaagcgcatgcatcgttatgcttcgaaagatgagctgaataacgtacataactctctcttaaaaataataaagtacaatggcgcccaatctgcaagatgcttgggagaacagttgggtttaaaaggccgaactgttttaccaattttgtgcgatttgctgtcaaggtgtttactcgatacacgtttggataagcctctatctcttgaatctcgatttgagttggccagttatggctaagaaagggttctcaagtttccatagaaaagcagtctcttcccaagatacgcttgaatcgatagagcttgtctctagcgctaattgtctagaaagtgttacgtatcaagatatatcagcatttcccgaaacaattgcggtagagattaatttccgattaagcattcttcgctttttagcgcgaaagtgcgaaaccattgtggccaaatcaattgaaccacatcgtgtagagctacagcaaaactatagtagaaaaatacccagtgcaataacgatatatcgatggtggcttgcttttcgaaaatcagactacaaccccattagcttagcacctaatatcaaggatagaggtaatagagagacaaaagtgtcaacagttgttgattctattatggaacaggcagttgaaagagttatatctggacgaaaagtcaatgttagctctgcatataaacgtgttcgacgaaaagttcgtcaatacaatctaactcatggaacgaaatacacgtatcctaagtacgaatctgtaagaaagcgagtaaaaaagaaaaccccatttgagttattagccgcagggaaaggggagagagtagctaagagagagtttcgccgaatgggaaaaaagatcctcacgtctagcgtgctagagagggttgaaatagatcacactgtcgttgacctttttgcagtacacgaagagtatcgaatcccattgggccgaccttggcttactcaattggttgattgttacagtaaagctgtaatcggtttttatttaggtttcgagcctcctagctatgtgtcggtttcccttgcacttaagaatgcaatacaacgcaaagatgacttaatctcctcgtatgaatcgatcgagaatgaatggctatgttatggcatcccagacctactcgtaactgataatggtaaagagtttttgtcgaaagcatttgatcaagcatgtgaatcactattgatcaatgtgcatcaaaataaagttgagacgcccgacaacaaacctcatgttgaacgtaactacgggactattaatacttctctgttagacgatttacctgggaaatccttcagccagtaccttcaaagagaagggtacgactctgtgggagaagctacccttacactcaatgagattagagaaatttacttaatttggttggtggatatttatcataaaaaacccaatcagagaggcactaattgtcctaatgttgcgtggaaaaagggttgtcaagaatgggaaccagaggagttctctggttctaaagacgaattagactttaaatttgctattgttgattacaaacaacttactaaagtagggataactgtctacaaagaactgagttatagcaatgaccgtttagctgaatatagagggaagaaaggaaaccataaagttcagttcaagtataaccctgagtgtatggcagttatttgggtgttggatgaggatatgaatgagtactttacagttaatgcgattgactacgaatatgcaagtagagtatcactttggcaacataaatataacatgaaatatcaagcagaactaaattcagcagaatatgatgaggacaaggaaattgatgcagaaataaaaattgaagaaatcgcagatcgttcaattgttaagactaacaaaatcagagctcggaggcgtggcgctaggcatcaagagaatagcgcaagggctaagtcaatcagtaatgcgaacccggcctcgatacaaaaacatgaagatgaaatcgttagtgcagataatgacgattgggatattgattatgtctgagaaatcgtcaaatgagtgaaacgcgtgaggctcgtatatcaagagctaaaagggcatttgtatccacaccgagcgttaggaaaatcttgagttacatggatagatgtagagatctatcagacctagagtctgagcctacatgcatgatggtctatggtgcttcgggtgtaggtaaaacgaccgtcatcaagaaatacttaaatcaaaacagaagagagtccgaagccgggggcgatataataccggttttgcatattgagttgccagacaatgcgaagccagtagatgcagcaagggaattgctggttgaaatgggtgacccgctagcactttatgaaactgacttagctagattgacgaaaagactgactgaattaatccctgcggtcggcgtgaagctgattattatcgatgagttccaacatttggtggaagaaaggtcaaatcgggttcttacccaagtaggtaattggctaaaaatgatacttaacaaaacgaaatgtccaattgttatatttggtatgccatactcaaaagttgtactgcaagcaaactcgcaacttcacgggcgattttccattcaggttgaactgcgcccctttagctaccagggaggtagaggtgtatttaaaacttttttggaataccttgataaagccctaccttttgaaaaacaggctggcttagccaacgaaagtttgcagaaaaaattgtatgcattctctcagggaaacatgcgttcgttgagaaaccttatttatcaagcatctatcgaagcaattgataatcagcatgagacgataaccgaagaagatttcgtttttgcatcgaagttgacatcgggcgataaacccaactcatggaaaaatccttttgaggagggtgttgaggtaacagaagatatgttacgaccgccaccaaaagatattggttgggaggactatttgagacattcaaccccgagagtgagtaaaccaggtagaaataaaaactttttcgaataacctaggctgctgcgctgctgccaccgctgagcaataactagcataaccccttggggcctctaaacgggtcttgaggggttttttgctgaaacctcaggcatttgagaagcacacggtcacactgcttccggtagtcaataaaccggtaaaccagcaatagacataagcggctatttaacgaccctgccctgaaccgacgaccgggtcatcgtggccggatcttgcggcccctcggcttgaacgaattgttagacattatttgccgactaccttggtgatctcgcctttcacgtagtggacaaattcttccaactgatctgcgcgcgaggccaagcgatcttcttcttgtccaagataagcctgtctagcttcaagtatgacgggctgatactgggccggcaggcgctccattgcccagtcggcagcgacatccttcggcgcgattttgccggttactgcgctgtaccaaatgcgggacaacgtaagcactacatttcgctcatcgccagcccagtcgggcggcgagttccatagcgttaaggtttcatttagcgcctcaaatagatcctgttcaggaaccggatcaaagagttcctccgccgctggacctaccaaggcaacgctatgttctcttgcttttgtcagcaagatagccagatcaatgtcgatcgtggctggctcgaagatacctgcaagaatgtcattgcgctgccattctccaaattgcagttcgcgcttagctggataacgccacggaatgatgtcgtcgtgcacaacaatggtgacttctacagcgcggagaatctcgctctctccaggggaagccgaagtttccaaaaggtcgttgatcaaagctcgccgcgttgtttcatcaagccttacggtcaccgtaaccagcaaatcaatatcactgtgtggcttcaggccgccatccactgcggagccgtacaaatgtacggccagcaacgtcggttcgagatggcgctcgatgacgccaactacctctgatagttgagtcgatacttcggcgatcaccgcttccctcatactcttcctttttcaatattattgaagcatttatcagggttattgtctcatgagcggatacatatttgaatgtatttagaaaaataaacaaatagctagctcactcggtcgctacgctccgggcgtgagactgcggcgggcgctgcggacacatacaaagttacccacagattccgtggataagcaggggactaacatgtgaggcaaaacagcagggccgcgccggtggcgtttttccataggctccgccctcctgccagagttcacataaacagacgcttttccggtgcatctgtgggagccgtgaggctcaaccatgaatctgacagtacgggcgaaacccgacaggacttaaagatccccaccgtttccggcgggtcgctccctcttgcgctctcctgttccgaccctgccgtttaccggatacctgttccgcctttctcccttacgggaagtgtggcgctttctcatagctcacacactggtatctcggctcggtgtaggtcgttcgctccaagctgggctgtaagcaagaactccccgttcagcccgactgctgcgccttatccggtaactgttcacttgagtccaacccggaaaagcacggtaaaacgccactggcagcagccattggtaactgggagttcgcagaggatttgtttagctaaacacgcggttgctcttgaagtgtgcgccaaagtccggctacactggaaggacagatttggttgctgtgctctgcgaaagccagttaccacggttaagcagttccccaactgacttaaccttcgatcaaaccacctccccaggtggttttttcgtttacagggcaaaagattacgcgcagaaaaaaaggatctcaagaagatcctttgatcttttctactgaaccgctctagatttcagtgcaatttatctcttcaaatgtagcacctgaagtcagccccatacgatataagttgtaattctcatgttagtcatgccccgcgcccaccggaaggagctgactgggttgaaggctctcaagggcatcggtcgagatcccggtgcctaatgagtgagctaacttacattaattgcgttgcgctcactgcccgctttccagtcgggaaacctgtcgtgccagctgcattaatgaatcggccaacgcgcggggagaggcggtttgcgtattgggcgccagggtggtttttcttttcaccagtgagacgggcaacagctgattgcccttcaccgcctggccctgagagagttgcagcaagcggtccacgctggtttgccccagcaggcgaaaatcctgtttgatggtggttaacggcgggatataacatgagctgtcttcggtatcgtcgtatcccactaccgagatgtccgcaccaacgcgcagcccggactcggtaatggcgcgcattgcgcccagcgccatctgatcgttggcaaccagcatcgcagtgggaacgatgccctcattcagcatttgcatggtttgttgaaaaccggacatggcactccagtcgccttcccgttccgctatcggctgaatttgattgcgagtgagatatttatgccagccagccagacgcagacgcgccgagacagaacttaatgggcccgctaacagcgcgatttgctggtgacccaatgcgaccagatgctccacgcccagtcgcgtaccgtcttcatgggagaaaataatactgttgatgggtgtctggtcagagacatcaagaaataacgccggaacattagtgcaggcagcttccacagcaatggcatcctggtcatccagcggatagttaatgatcagcccactgacgcgttgcgcgagaagattgtgcaccgccgctttacaggcttcgacgccgcttcgttctaccatcgacaccaccacgctggcacccagttgatcggcgcgagatttaatcgccgcgacaatttgcgacggcgcgtgcagggccagactggaggtggcaacgccaatcagcaacgactgtttgcccgccagttgttgtgccacgcggttgggaatgtaattcagctccgccatcgccgcttccactttttcccgcgttttcgcagaaacgtggctggcctggttcaccacgcgggaaacggtctgataagagacaccggcatactctgcgacatcgtataacgttactggtttcac

SEQ ID NO: 87 - DNA, 11812 bp, synthetic construct
  source 1..11812: mol_type = other DNA
attcaccaccctgaattgactctcttccgggcgctatcatgccataccgcgaaaggttttgcgccattcgatggtgtccgggatctcgacgctctcccttatgcgactcctgcattaggaaattaatacgactcactataggggaattgtgagcggataacaattcccctgtagaaataattttgtttaactttaataaggagatataccatgggtgaactgccgagtaggtagctgataacagtacagcgcggctgaaatcatcattaaagcggtgaactgccgagtaggtagctgataacggatccgaattcgagcgaaggagatatacatatgtttttgcaaagacctaaaccttacagcgatgaaagtttagaaagtttctttatccgagtggctaacaaaaatggctacggtgatgtccatcgcttcctagaagccactaaacgattccttcaagacattgaccataatggctatcaaacctttccgactgatataactcggataaacccatactcagctaaaaacagttccagcgcacgaactgcgtcattcctgaaacttgcacaattgacatttaatgaaccgccagagctacttgggttggcaattaacagaacaaacatgaaatactcgccgtcaactagcgcggttgttagaggtgcagaagtctttcctcgcagtttactacggacgcactccatcccctgctgtcctttgtgtctgcgagaaaatggctacgcctcctacctttggcactttcaggggtacgaatactgccacagccataacgtacctttaattaccacttgtagctgtggtaaggagtttgactaccgagtatctgggttaaagggcatttgctgcaaatgcaaggagcctatcaccttaaccagcagggagaacggtcatgaggcagcgtgtactgtttcaaactggcttgctggccatgaatctaaacctctgccaaatcttcctaaaagctaccgatggggtttagttcattggtggatgggtattaaagatagcgagttcgatcacttttcgttcgttcaatttttctcaaactggccaaggtcattccactcgataatcgaagatgaagtagagttcaaccttgagcatgctgttgtcagcacgtctgaattacgactaaaagatcttcttggtcgattgtttttcggttcaattcggttacctgagcggaatcttcaacacaatatcatccttggtgagcttctctgctatttagaaaatcgtttatggcaagacaagggattaatcgccaacctcaaaatgaacgcgttagaggcgactgtaatgttaaattgtagcctcgatcagattgcatcaatggttgaacaacgcatcttgaagccaaatcgaaaaagcaagcccaacagccctcttgatgttaccgattatctatttcatttcggcgatattttctgtctttggttagctgagttccaaagcgatgagtttaaccgttcgttttatgtgtcgaggtggtaaatgcaaactctgaaagaactaatcgcatccaatcctgacgacttaacaactgaacttaagagagcatttcgtccactcacaccgcatattgcaattgatggtaatgaacttgacgcactgacgatattagtcaatttaaccgataagactgatgatcagaaagacctgctcgatcgagccaaatgcaagcaaaaacttcgagatgaaaaatggtgggctagctgcataaattgcgttaattacagacaaagccataacccaaaattcccggatatacgttctgaaggcgtgattcgaacccaagccctgggtgaattaccgagtttcctactctcgtcctcaaaaatcccaccataccattggtcatatagccatgattcaaaatacgtcaacaaaagcgcattcctcaccaatgagttttgttgggatggtgagatctcatgtttgggtgagcttcttaaagatgcagatcacccactttggaatactttgaaaaagttaggttgttctcaaaaaacttgcaaagcaatggcaaaacaactagctgatattactctcacgactatcaatgtcacactcgcaccaaattacctgactcaaatatctctccccgatagtgatacatcctacatttcactctctcctgttgcatcgctatcgatgcaaagccactttcatcagaggctccaagatgaaaatcggcatagcgcgataacgcggtttagccgaactaccaacatgggggtcactgcgatgacatgtggcggcgcatttagaatgttaaagtctggcgctaagttttccagcccccctcatcaccgattaaacagtaaacgaagttggttgacgtcagagcatgttcagtcattaaaacagtaccagcgcctcaacaaaagcctcatacctgaaaactctcggattgcactccgtagaaaatacaaaatcgagcttcaaaatatggtcagatcttggtttgcaatgcaagaccatacccttgattcgaacatacttatccaacatttgaatcatgacctatcttacttaggagccacaaaacgttttgcatacgatccagcgatgaccaagctctttactgagcttttgaaacgagagttatcaaattcaatcaataatggtgagcaacacactaatggatcgtttttagtcctaccgaatatcagggtttgtggcgcaacagctttaagctccccggtaacggtggggattccatcacttacagctttctttggcttcgttcacgcatttgaacggaatataaatcgcaccacctcatcgtttcgtgttgaatcctttgcgatatgcgtccatcaactacatgtcgagaagcgaggtttgacagcagagtttgtggaaaaaggcgacgggactatatccgctcccgcgacccgggatgactggcagtgtgatgtcgtatttagccttattttgaacaccaactttgctcaacatattgaccaagatacgttagttacatcactaccaaagcgattggctcggggttcagcaaaaattgcgattgatgactttaaacatatcaactcattctcgacattagaaacagcgatcgaatctctgccaatagaagctggtaggtggttatcactttacgcacagtcaaacaataatctaagtgatctattagcagccatgacagaggaccatcagctcatggcaagctgcgtcggttaccacttgttagaagagcccaaagataaaccaaactccctcagaggttacaaacacgctatcgccgagtgcatcattggactcattaactcaatcacctttagctcagagactgatcccaacacaatcttttggtcgctaaagaactatcaaaactacctagtggtacagccaaggagtatcaacgatgaaactaccgacaaatctagcctatgagcgctctatcgacccatcagatgtctgtttttttgtcgtctggcccgatgatagaaaaacacctttaacctacaattctcgtactctgctcgggcaaatggaagcggcatcattagcctatgatgtctcaggtcaaccaataaaaagtgccaccgctgaggcgttagctcaagggaaccctcatcaagttgatttctgccacgttccatacggtgcgagtcatattgaatgcagtttctccgtctcgttttcttctgaactacgtcaaccatataagtgtaactcaagcaaagttaaacaaacgctagtgcaattagtcgagctctacgaaacgaaaatcggctggactgagctagcaacccgatatttgatgaacatttgcaacggtaaatggctgtggaaaaatacccgtaaagcctattgctggaacattgtacttacaccttggccttggaacggggaaaaggttggatttgaagatattcgtactaactacacctcacggcaagactttaaaaataataaaaattggtctgctatagttgaaatgatcaaaaccgcattttctagtactgatgggctggcgatatttgaagtcagggccaccttgcacttgccaacgaatgctatggtgcggccaagccaagttttcacagaaaaagaaagtggcagtaaaagtaaatctaaaactcaaaacagtcgagtttttcagagtacaactattgatggtgaacgatcgccaatactaggggcctttaaaacgggagcagctattgcaaccattgacgactggtatcctgaagccactgagccactaagggtcggacggtttggggttcatcgcgaagatgtcacttgctaccgtcatccgtctaccggaaaagattttttctcgatattacaacaagcagagcactatattgaagtgttgagcgccaacaaaactcccgctcaagaaactatcaacgacatgcactttttaatggctaacctgattaagggtgggatgttccagcataaaggagactgactgtgaaatggtattataagacaatcacctttctgccagagttgtgcaacaacgagtcactggctgcaaagtgtctccgcgttctgcatggatttaactatcagtatgagacacgaaatatcggcgtttcatttccgctttggtgtgatgcaacggttggaaaaaagatttcatttgtcagcaagaacaagatagaactcgacttactacttaaacaacactatttcgtccaaatggaacaacttcaatactttcatatatccaacactgttctcgtcccagaagattgtacatacgtttcctttagacgctgtcaatctatagataagctcacagcagcagggctggcaaggaaaatcagacgcctggagaaacgtgctctatctagaggcgagcaatttgacccatcatcttttgctcaaaaagagcatactgcaatagcgcactaccactcacttggggagtccagcaaacagacgaaccgcaactttcgactcaatatcaggatgctctcggagcaaccccgtgaggggaactcgatttttagtagctatggcttatcaaattcagaaaactcgtttcagcctgtacccttaatctgacctttaataaggagatataccatggcgacaagtttacctacgccctcagcaattacgacttcggcgttagagtatgcattccatactcccgctcgcaatctaacgaaatctcgcggaaaaaacattcatcgttatgtcagtgtaaagatgagtaagaggattacggtagaatctactctagagtgtgatgcctgctatcactttgattttgagccaagtattgttcgcttttgcgctcaaccgattcgatttttatattatctcaatggtcagtctcactcctatgttcctgactttctagttcaatttgataccaacgagtttgttctatatgaagtaaagtcagcttatgctaagaacaaacctgattttgatgttgaatgggaggcgaaagtaaaagcagcaactgaactagggctagaattggagcttgttgaagagagtgatattagggatacggttgtattaaataatcttaagcgcatgcatcgttatgcttcgaaagatgagctgaataacgtacataactctctcttaaaaataataaagtacaatggcgcccaatctgcaagatgcttgggagaacagttgggtttaaaaggccgaactgttttaccaattttgtgcgatttgctgtcaaggtgtttactcgatacacgtttggataagcctctatctcttgaatctcgatttgagttggccagttatggctaagaaagggttctcaagtttccatagaaaagcagtctcttcccaagatacgcttgaatcgatagagcttgtctctagcgctaattgtctagaaagtgttacgtatcaagatatatcagcatttcccgaaacaattgcggtagagattaatttccgattaagcattcttcgctttttagcgcgaaagtgcgaaaccattgtggccaaatcaattgaaccacatcgtgtagagctacagcaaaactatagtagaaaaatacccagtgcaataacgatatatcgatggtggcttgcttttcgaaaatcagactacaaccccattagcttagcacctaatatcaaggatagaggtaatagagagacaaaagtgtcaacagttgttgattctattatggaacaggcagttgaaagagttatatctggacgaaaagtcaatgttagctctgcatataaacgtgttcgacgaaaagttcgtcaatacaatctaactcatggaacgaaatacacgtatcctaagtacgaatctgtaagaaagcgagtaaaaaagaaaaccccatttgagttattagccgcagggaaaggggagagagtagctaagagagagtttcgccgaatgggaaaaaagatcctcacgtctagcgtgctagagagggttgaaatagatcacactgtcgttgacctttttgcagtacacgaagagtatcgaatcccattgggccgaccttggcttactcaattggttgattgttacagtaaagctgtaatcggtttttatttaggtttcgagcctcctagctatgtgtcggtttcccttgcacttaagaatgcaatacaacgcaaagatgacttaatctcctcgtatgaatcgatcgagaatgaatggctatgttatggcatcccagacctactcgtaactgataatggtaaagagtttttgtcgaaagcatttgatcaagcatgtgaatcactattgatcaatgtgcatcaaaataaagttgagacgcccgacaacaaacctcatgttgaacgtaactacgggactattaatacttctctgttagacgatttacctgggaaatccttcagccagtaccttcaaagagaagggtacgactctgtgggagaagctacccttacactcaatgagattagagaaatttacttaatttggttggtggatatttatcataaaaaacccaatcagagaggcactaattgtcctaatgttgcgtggaaaaagggttgtcaagaatgggaaccagaggagttctctggttctaaagacgaattagactttaaatttgctattgttgattacaaacaacttactaaagtagggataactgtctacaaagaactgagttatagcaatgaccgtttagctgaatatagagggaagaaaggaaaccataaagttcagttcaagtataaccctgagtgtatggcagttatttgggtgttggatgaggatatgaatgagtactttacagttaatgcgattgactacgaatatgcaagtagagtatcactttggcaacataaatataacatgaaatatcaagcagaactaaattcagcagaatatgatgaggacaaggaaattgatgcagaaataaaaattgaagaaatcgcagatcgttcaattgttaagactaacaaaatcagagctcggaggcgtggcgctaggcatcaagagaatagcgcaagggctaagtcaatcagtaatgcgaacccggcctcgatacaaaaacatgaagatgaaatcgttagtgcagataatgacgattgggatattgattatgtctgagaaatcgtcaaatgagtgaaacgcgtgaggctcgtatatcaagagctaaaagggcatttgtatccacaccgagcgttaggaaaatcttgagttacatggatagatgtagagatctatcagacctagagtctgagcctacatgcatgatggtctatggtgcttcgggtgtaggtaaaacgaccgtcatcaagaaatacttaaatcaaaacagaagagagtccgaagccgggggcgatataataccggttttgcatattgagttgccagacaatgcgaagccagtagatgcagcaagggaattgctggttgaaatgggtgacccgctagcactttatgaaactgacttagctagattgacgaaaagactgactgaattaatccctgcggtcggcgtgaagctgattattatcgatgagttccaacatttggtggaagaaaggtcaaatcgggttcttacccaagtaggtaattggctaaaaatgatacttaacaaaacgaaatgtccaattgttatatttggtatgccatactcaaaagttgtactgcaagcaaactcgcaacttcacgggcgattttccattcaggttgaactgcgcccctttagctaccagggaggtagaggtgtatttaaaacttttttggaataccttgataaagccctaccttttgaaaaacaggctggcttagccaacgaaagtttgcagaaaaaattgtatgcattctctcagggaaacatgcgttcgttgagaaaccttatttatcaagcatctatcgaagcaattgataatcagcatgagacgataaccgaagaagatttcgtttttgcatcgaagttgacatcgggcgataaacccaactcatggaaaaatccttttgaggagggtgttgaggtaacagaagatatgttacgaccgccaccaaaagatattggttgggaggactatttgagacattcaaccccgagagtgagtaaaccaggtagaaataaaaactttttcgaataacctaggctgctgcgctgctgccaccgctgagcaataactagcataaccccttggggcctctaaacgggtcttgaggggttttttgctgaaacctcaggcatttgagaagcacacggtcacactgcttccggtagtcaataaaccggtaaaccagcaatagacataagcggctatttaacgaccctgccctgaaccgacgaccgggtcatcgtggccggatcttgcggcccctcggcttgaacgaattgttagacattatttgccgactaccttggtgatctcgcctttcacgtagtggacaaattcttccaactgatctgcgcgcgaggccaagcgatcttcttcttgtccaagataagcctgtctagcttcaagtatgacgggctgatactgggccggcaggcgctccattgcccagtcggcagcgacatccttcggcgcgattttgccggttactgcgctgtaccaaatgcgggacaacgtaagcactacatttcgctcatcgccagcccagtcgggcggcgagttccatagcgttaaggtttcatttagcgcctcaaatagatcctgttcaggaaccggatcaaagagttcctccgccgctggacctaccaaggcaacgctatgttctcttgcttttgtcagcaagatagccagatcaatgtcgatcgtggctggctcgaagatacctgcaagaatgtcattgcgctgccattctccaaattgcagttcgcgcttagctggataacgccacggaatgatgtcgtcgtgcacaacaatggtgacttctacagcgcggagaatctcgctctctccaggggaagccgaagtttccaaaaggtcgttgatcaaagctcgccgcgttgtttcatcaagccttacggtcaccgtaaccagcaaatcaatatcactgtgtggcttcaggccgccatccactgcggagccgtacaaatgtacggccagcaacgtcggttcgagatggcgctcgatgacgccaactacctctgatagttgagtcgatacttcggcgatcaccgcttccctcatactcttcctttttcaatattattgaagcatttatcagggttattgtctcatgagcggatacatatttgaatgtatttagaaaaataaacaaatagctagctcactcggtcgctacgctccgggcgtgagactgcggcgggcgctgcggacacatacaaagttacccacagattccgtggataagcaggggactaacatgtgaggcaaaacagcagggccgcgccggtggcgtttttccataggctccgccctcctgccagagttcacataaacagacgcttttccggtgcatctgtgggagccgtgaggctcaaccatgaatctgacagtacgggcgaaacccgacaggacttaaagatccccaccgtttccggcgggtcgctccctcttgcgctctcctgttccgaccctgccgtttaccggatacctgttccgcctttctcccttacgggaagtgtggcgctttctcatagctcacacactggtatctcggctcggtgtaggtcgttcgctccaagctgggctgtaagcaagaactccccgttcagcccgactgctgcgccttatccggtaactgttcacttgagtccaacccggaaaagcacggtaaaacgccactggcagcagccattggtaactgggagttcgcagaggatttgtttagctaaacacgcggttgctcttgaagtgtgcgccaaagtccggctacactggaaggacagatttggttgctgtgctctgcgaaagccagttaccacggttaagcagttccccaactgacttaaccttcgatcaaaccacctccccaggtggttttttcgtttacagggcaaaagattacgcgcagaaaaaaaggatctcaagaagatcctttgatcttttctactgaaccgctctagatttcagtgcaatttatctcttcaaatgtagcacctgaagtcagccccatacgatataagttgtaattctcatgttagtcatgccccgcgcccaccggaaggagctgactgggttgaaggctctcaagggcatcggtcgagatcccggtgcctaatgagtgagctaacttacattaattgcgttgcgctcactgcccgctttccagtcgggaaacctgtcgtgccagctgcattaatgaatcggccaacgcgcggggagaggcggtttgcgtattgggcgccagggtggtttttcttttcaccagtgagacgggcaacagctgattgcccttcaccgcctggccctgagagagttgcagcaagcggtccacgctggtttgccccagcaggcgaaaatcctgtttgatggtggttaacggcgggatataacatgagctgtcttcggtatcgtcgtatcccactaccgagatgtccgcaccaacgcgcagcccggactcggtaatggcgcgcattgcgcccagcgccatctgatcgttggcaaccagcatcgcagtgggaacgatgccctcattcagcatttgcatggtttgttgaaaaccggacatggcactccagtcgccttcccgttccgctatcggctgaatttgattgcgagtgagatatttatgccagccagccagacgcagacgcgccgagacagaacttaatgggcccgctaacagcgcgatttgctggtgacccaatgcgaccagatgctccacgcccagtcgcgtaccgtcttcatgggagaaaataatactgttgatgggtgtctggtcagagacatcaagaaataacgccggaacattagtgcaggcagcttccacagcaatggcatcctggtcatccagcggatagttaatgatcagcccactgacgcgttgcgcgagaagattgtgcaccgccgctttacaggcttcgacgccgcttcgttctaccatcgacaccaccacgctggcacccagttgatcggcgcgagatttaatcgccgcgacaatttgcgacggcgcgtgcagggccagactggaggtggcaacgccaatcagcaacgactgtttgcccgccagttgttgtgccacgcggttgggaatgtaattcagctccgccatcgccgcttccactttttcccgcgttttcgcagaaacgtggctggcctggttcaccacgcgggaaacggtctgataagagacaccggcatactctgcgacatcgtataacgttactggtttcac

SEQ ID NO: 88 - DNA, 12120 bp, synthetic construct
  source 1..12120: mol_type = other DNA
attcaccaccctgaattgactctcttccgggcgctatcatgccataccgcgaaaggttttgcgccattcgatggtgtccgggatctcgacgctctcccttatgcgactcctgcattaggaaattaatacgactcactataggggaattgtgagcggataacaattcccctgtagaaataattttgtttaactttaataaggagatataccatgggtgaactgccgagtaggtagctgataacagtacagcgcggctgaaatcatcattaaagcggtgaactgccgagtaggtagctgataacgaattcgagcgaggaggttacatatgggacctaagaaaaagcgtaaagttggttccggtatgtttttgcaaagacctaaaccttacagcgatgaaagtttagaaagtttctttatccgagtggctaacaaaaatggctacggtgatgtccatcgcttcctagaagccactaaacgattccttcaagacattgaccataatggctatcaaacctttccgactgatataactcggataaacccatactcagctaaaaacagttccagcgcacgaactgcgtcattcctgaaacttgcacaattgacatttaatgaaccgccagagctacttgggttggcaattaacagaacaaacatgaaatactcgccgtcaactagcgcggttgttagaggtgcagaagtctttcctcgcagtttactacggacgcactccatcccctgctgtcctttgtgtctgcgagaaaatggctacgcctcctacctttggcactttcaggggtacgaatactgccacagccataacgtacctttaattaccacttgtagctgtggtaaggagtttgactaccgagtatctgggttaaagggcatttgctgcaaatgcaaggagcctatcaccttaaccagcagggagaacggtcatgaggcagcgtgtactgtttcaaactggcttgctggccatgaatctaaacctctgccaaatcttcctaaaagctaccgatggggtttagttcattggtggatgggtattaaagatagcgagttcgatcacttttcgttcgttcaatttttctcaaactggccaaggtcattccactcgataatcgaagatgaagtagagttcaaccttgagcatgctgttgtcagcacgtctgaattacgactaaaagatcttcttggtcgattgtttttcggttcaattcggttacctgagcggaatcttcaacacaatatcatccttggtgagcttctctgctatttagaaaatcgtttatggcaagacaagggattaatcgccaacctcaaaatgaacgcgttagaggcgactgtaatgttaaattgtagcctcgatcagattgcatcaatggttgaacaacgcatcttgaagccaaatcgaaaaagcaagcccaacagccctcttgatgttaccgattatctatttcatttcggcgatatcttctgtctttggttagctgagttccaaagcgatgagtttaaccgttcgttttatgtgtcgaggtggtaaatgggtcccaagaaaaagcgcaaggtcggtaccggtatgcaaactctgaaagaactaatcgcatccaatcctgacgacttaacaactgaacttaagagagcatttcgtccactcacaccgcatattgcaattgatggtaatgaacttgacgcactgacgatattagtcaatttaaccgataagactgatgatcagaaagacctgctcgatcgagccaaatgcaagcaaaaacttcgagatgaaaaatggtgggctagctgcataaattgcgttaattacagacaaagccataacccaaaattcccggatatacgttctgaaggcgtgattcgaacccaagccctgggtgaattaccgagtttcctactctcgtcctcaaaaatcccaccataccattggtcatatagccatgattcaaaatacgtcaacaaaagcgcattcctcaccaatgagttttgttgggatggtgagatctcatgtttgggtgagcttcttaaagatgcagatcacccactttggaatactttgaaaaagttaggttgttctcaaaaaacttgcaaagcaatggcaaaacaactagctgatattactctcacgactatcaatgtcacactcgcaccaaattacctgactcaaatatctctccccgatagtgatacatcctacatttcactctctcctgttgcatcgctatcgatgcaaagccactttcatcagaggctccaagatgaaaatcggcatagcgcgataacgcggtttagccgaactaccaacatgggggtcactgcgatgacatgtggcggcgcatttagaatgttaaagtctggcgctaagttttccagcccccctcatcaccgattaaacagtaaacgaagttggttgacgtcagagcatgttcagtcattaaaacagtaccagcgcctcaacaaaagcctcatacctgaaaactctcggattgcactccgtagaaaatacaaaatcgagcttcaaaatatggtcagatcttggtttgcaatgcaagaccatacccttgattcgaacatacttatccaacatttgaatcatgacctatcttacttaggagccacaaaacgttttgcatacgatccagcgatgaccaagctctttactgagcttttgaaacgagagttatcaaattcaatcaataatggtgagcaacacactaatggatcgtttttagtcctaccgaatatcagggtttgtggcgcaacagctttaagctccccggtaacggtggggattccatcacttacagctttctttggcttcgttcacgcatttgaacggaatataaatcgcaccacctcatcgtttcgtgttgaatcctttgcgatatgcgtccatcaactacatgtcgagaagcgaggtttgacagcagagtttgtggaaaaaggcgacgggactatatccgctcccgcgacccgggatgactggcagtgtgatgtcgtatttagccttattttgaacaccaactttgctcaacatattgaccaagatacgttagttacatcactaccaaagcgattggctcggggttcagcaaaaattgcgattgatgactttaaacatatcaactcattctcgacattagaaacagcgatcgaatctctgccaatagaagctggtaggtggttatcactttacgcacagtcaaacaataatctaagtgatctattagcagccatgacagaggaccatcagctcatggcaagctgcgtcggttaccacttgttagaggagcccaaagataaaccaaactccctcagaggttacaaacacgctatcgccgagtgcatcattggactcattaactcaatcacctttagctcagagactgatcccaacacaatcttttggtcgctaaagaactatcaaaactacctagtggtacagccaaggagtatcaacgacgaaactaccgacaaatctagcctatgaagcttgaaggaggtaaataatgggcccgaagaaaaagcgaaaagtaggctcgagtatgaaactaccgacaaatctagcctatgagcgctctatcgacccatcagatgtctgtttttttgtcgtctggcccgatgatagaaaaacacctttaacctacaattctcgtactctgctcgggcaaatggaagcggcatcattagcctatgatgtctcaggtcaaccaataaaaagtgccaccgctgaggcgttagctcaagggaaccctcatcaagttgatttctgccacgttccatacggtgcgagtcatattgaatgcagtttctccgtctcgttttcttctgaactacgtcaaccatataagtgtaactcaagcaaagttaaacaaacgctagtgcaattagtcgaactctacgaaacgaaaatcggctggactgagctagcaacccgatatttgatgaacatttgcaacggtaaatggctgtggaaaaatacccgtaaagcctattgctggaacattgtacttacaccttggccttggaacggggaaaaggttggatttgaagatattcgtactaactacacctcacggcaagactttaaaaataataaaaattggtctgctatagttgaaatgatcaaaaccgcattttctagtactgatgggctggcgatatttgaagtcagggccaccttgcacttgccaacgaatgctatggtgcggccaagccaagttttcacagaaaaagaaagtggcagtaaaagtaaatctaaaactcaaaacagtcgagtttttcagagtacaactattgatggtgaacgatcgccaatactaggggcctttaaaacgggagcagctattgcaaccattgacgactggtatcctgaagccactgagccactaagggtcggacggtttggggttcatcgcgaagatgtcacttgctaccgtcatccgtctaccggaaaagattttttctcgatattacaacaagcagagcactatattgaagtgttgagcgccaacaaaactcccgctcaagaaactatcaacgacatgcactttttaatggctaacctgattaagggtgggatgttccagcataaaggagactgactatggggcctaagaaaaagcggaaggtgggttccggagtgaaatggtattataagacaatcacctttctgccagagttgtgcaacaacgagtcactggctgcaaagtgtctccgcgttctgcatggatttaactatcagtatgagacacgaaatatcggcgtttcatttccgctttggtgtgatgcaacggttggaaaaaagatttcatttgtcagcaagaacaagatagaactcgacttactacttaaacaacactatttcgtccaaatggaacaacttcaatactttcatatatccaacactgttctcgtcccagaagattgtacatacgtttcctttagacgctgtcaatctatagataagctcacagcagcagggctggcaaggaaaatcagacgcctggagaaacgtgctctatctagaggcgagcaatttgacccatcatcttttgctcaaaaagagcatactgcaatagcgcactaccactcacttggggagtccagcaaacagacgaaccgcaactttcgactcaatatcaggatgctctcggagcaaccccgtgaggggaactcgatttttagtagctatggcttatcaaattcagaaaactcgtttcagcctgtacccttaatctgagtcgacataaggagatatatcatggcgacaagtttacctacgccctcagcaattacgacttcggcgttagagtatgcattccatactcccgctcgcaatctaacgaaatctcgcggaaaaaacattcatcgttatgtcagtgtaaagatgagtaagaggattacggtagaatctactctagagtgtgatgcctgctatcactttgattttgagccaagtattgttcgcttttgcgcacaaccgattcgatttttatattatctcaatggtcagtctcactcctatgttcctgactttctagttcaatttgataccaacgagtttgttctatatgaagtaaagtcagcttatgctaagaacaaacctgattttgatgttgaatgggaggcgaaagtaaaagcagcaactgaactagggctagaattggagcttgttgaagagagtgatattagggatacggttgtattaaataatcttaagcgcatgcatcgttatgcttcgaaagatgagctgaataacgtacataactctctcttaaaaataataaagtacaatggcgcccaatctgcaagatgcttgggagaacagttgggtttaaaaggccgaactgttttaccaattttgtgcgatttgctgtcaaggtgtttactcgatacacgtttggataagcctctatctcttgaatctcgatttgagttggcctcgtacggcggttcacccaagaaaaagcgcaaggtctaactagtaggaggctcgagatgggaccgaagaaaaagagaaaagtgggatccgcgatggctaagaaagggttctcaagtttccatagaaaagcagtctcttcccaagatacgcttgaatcgatagagcttgtctctagcgctaattgtctagaaagtgttacgtatcaagatatatcagcatttcccgaaacaattgcggtagagattaatttccgattaagcattcttcgctttttagcgcgaaagtgcgaaaccattgtggccaaatcaattgaaccacatcgtgtagagctacagcaaaactatagtagaaaaatacccagtgcaataacgatatatcgatggtggcttgcttttcgaaaatcagactacaaccccattagcttagcacctaatatcaaggatagaggtaatagagagacaaaagtgtcaacagttgttgattctattatggaacaggcagttgaaagagttatatctggacgaaaagtcaatgttagctctgcatataaacgtgttcgacgaaaagttcgtcaatacaatctaactcatggaacgaaatacacgtatcctaagtacgaatctgtaagaaagcgagtaaaaaagaaaaccccatttgagttattagccgcagggaaaggggagagagtagctaagagagagtttcgccgaatgggaaaaaagatcctcacgtctagcgtgctagagagggttgaaatagatcacactgtcgttgacctttttgcagtacacgaagagtatcgaatcccattgggccgaccttggcttactcaattggttgattgttacagtaaagctgtaatcggtttttatttaggtttcgagcctcctagctatgtgtcggtttcccttgcacttaagaatgcaatacaacgcaaagatgacttaatctcctcgtatgaatcgatcgagaatgaatggctatgttatggcatcccagacctactcgtaactgataatggtaaagagtttttgtcgaaagcatttgatcaagcatgtgaatcactattgatcaatgtgcatcaaaataaagttgagacgcccgacaacaaacctcatgttgaacgtaactacgggactattaatacttctctgttagacgatttacctgggaaatccttcagccagtaccttcaaagagaagggtacgactctgtgggagaagctacccttacactcaatgagattagagaaatttacttaatttggttggtggatatttatcataaaaaacccaatcagagaggcactaattgtcctaatgttgcgtggaaaaagggttgtcaagaatgggaaccagaggagttctctggttctaaagacgaattagactttaaatttgctattgttgattacaaacaacttactaaagtagggataactgtctacaaagaactgagttatagcaatgaccgtttagctgaatatagagggaagaaaggaaaccataaagttcagttcaagtataaccctgagtgtatggcagttatttgggtgttggatgaggatatgaatgagtactttacagttaatgcgattgactacgaatatgcaagtagagtatcactttggcaacataaatataacatgaaatatcaagcagaactaaattcagcagaatatgatgaggacaaggaaattgatgcagaaataaaaattgaagaaatcgcagatcgttcaattgttaagactaacaaaatcagagctcggaggcgtggcgctaggcatcaagagaatagcgcaagggctaagtcaatcagtaatgcgaacccggcctcgatacaaaaacatgaagatgaaatcgttagtgcagataatgacgattgggatattgattatgtctgagaaatcgtcaaatgggtcctaagaaaaagaggaaagtaggctcttccatgagtgaaacgcgtgaggctcgtatatcaagagctaaaagggcatttgtatccacaccgagcgttaggaaaatcttgagttacatggatagatgtagagatctatcagacctagagtctgagcctacatgcatgatggtctatggtgcttcgggtgtaggtaaaacgaccgtcatcaagaaatacttaaatcaaaacagaagagagtccgaagccgggggcgatataataccggttttgcatattgagttgccagacaatgcgaagccagtagatgcagcaagggaattgctggttgaaatgggtgacccgctagcactttatgaaactgacttagctagattgacgaaaagactgactgaattaatccctgcggtcggcgtgaagctgattattatcgatgagttccaacatttggtggaagaaaggtcaaatcgggttcttacccaagtaggtaattggctaaaaatgatacttaacaaaacgaaatgtccaattgttatatttggtatgccatactcaaaagttgtactgcaagcaaactcgcaacttcacgggcgattttccattcaggttgaactgcgcccctttagctaccagggaggtagaggtgtatttaaaacttttttggaataccttgataaagccctaccttttgaaaaacaggctggcttagccaacgaaagtttgcagaaaaaattgtatgcattctctcagggaaacatgcgttcgttgagaaaccttatttatcaagcatctatcgaagcaattgataatcagcatgagacgataaccgaagaagatttcgtttttgcatcgaagttgacatcgggcgataaacccaactcatggaaaaatccttttgaggagggtgttgaggtaacagaagatatgttacgaccgccaccaaaagatattggttgggaggactatttgagacattcaaccccgagagtgagtaaaccaggtagaaataaaaactttttcgaataacctaggctgctgcgctgctgccaccgctgagcaataactagcataaccccttggggcctctaaacgggtcttgaggggttttttgctgaaacctcaggcatttgagaagcacacggtcacactgcttccggtagtcaataaaccggtaaaccagcaatagacataagcggctatttaacgaccctgccctgaaccgacgaccgggtcatcgtggccggatcttgcggcccctcggcttgaacgaattgttagacattatttgccgactaccttggtgatctcgcctttcacgtagtggacaaattcttccaactgatctgcgcgcgaggccaagcgatcttcttcttgtccaagataagcctgtctagcttcaagtatgacgggctgatactgggccggcaggcgctccattgcccagtcggcagcgacatccttcggcgcgattttgccggttactgcgctgtaccaaatgcgggacaacgtaagcactacatttcgctcatcgccagcccagtcgggcggcgagttccatagcgttaaggtttcatttagcgcctcaaatagatcctgttcaggaaccggatcaaagagttcctccgccgctggacctaccaaggcaacgctatgttctcttgcttttgtcagcaagatagccagatcaatgtcgatcgtggctggctcgaagatacctgcaagaatgtcattgcgctgccattctccaaattgcagttcgcgcttagctggataacgccacggaatgatgtcgtcgtgcacaacaatggtgacttctacagcgcggagaatctcgctctctccaggggaagccgaagtttccaaaaggtcgttgatcaaagctcgccgcgttgtttcatcaagccttacggtcaccgtaaccagcaaatcaatatcactgtgtggcttcaggccgccatccactgcggagccgtacaaatgtacggccagcaacgtcggttcgagatggcgctcgatgacgccaactacctctgatagttgagtcgatacttcggcgatcaccgcttccctcatactcttcctttttcaatattattgaagcatttatcagggttattgtctcatgagcggatacatatttgaatgtatttagaaaaataaacaaatagctagctcactcggtcgctacgctccgggcgtgagactgcggcgggcgctgcggacacatacaaagttacccacagattccgtggataagcaggggactaacatgtgaggcaaaacagcagggccgcgccggtggcgtttttccataggctccgccctcctgccagagttcacataaacagacgcttttccggtgcatctgtgggagccgtgaggctcaaccatgaatctgacagtacgggcgaaacccgacaggacttaaagatccccaccgtttccggcgggtcgctccctcttgcgctctcctgttccgaccctgccgtttaccggatacctgttccgcctttctcccttacgggaagtgtggcgctttctcatagctcacacactggtatctcggctcggtgtaggtcgttcgctccaagctgggctgtaagcaagaactccccgttcagcccgactgctgcgccttatccggtaactgttcacttgagtccaacccggaaaagcacggtaaaacgccactggcagcagccattggtaactgggagttcgcagaggatttgtttagctaaacacgcggttgctcttgaagtgtgcgccaaagtccggctacactggaaggacagatttggttgctgtgctctgcgaaagccagttaccacggttaagcagttccccaactgacttaaccttcgatcaaaccacctccccaggtggttttttcgtttacagggcaaaagattacgcgcagaaaaaaaggatctcaagaagatcctttgatcttttctactgaaccgctctagatttcagtgcaatttatctcttcaaatgtagcacctgaagtcagccccatacgatataagttgtaattctcatgttagtcatgccccgcgcccaccggaaggagctgactgggttgaaggctctcaagggcatcggtcgagatcccggtgcctaatgagtgagctaacttacattaattgcgttgcgctcactgcccgctttccagtcgggaaacctgtcgtgccagctgcattaatgaatcggccaacgcgcggggagaggcggtttgcgtattgggcgccagggtggtttttcttttcaccagtgagacgggcaacagctgattgcccttcaccgcctggccctgagagagttgcagcaagcggtccacgctggtttgccccagcaggcgaaaatcctgtttgatggtggttaacggcgggatataacatgagctgtcttcggtatcgtcgtatcccactaccgagatgtccgcaccaacgcgcagcccggactcggtaatggcgcgcattgcgcccagcgccatctgatcgttggcaaccagcatcgcagtgggaacgatgccctcattcagcatttgcatggtttgttgaaaaccggacatggcactccagtcgccttcccgttccgctatcggctgaatttgattgcgagtgagatatttatgccagccagccagacgcagacgcgccgagacagaacttaatgggcccgctaacagcgcgatttgctggtgacccaatgcgaccagatgctccacgcccagtcgcgtaccgtcttcatgggagaaaataatactgttgatgggtgtctggtcagagacatcaagaaataacgccggaacattagtgcaggcagcttccacagcaatggcatcctggtcatccagcggatagttaatgatcagcccactgacgcgttgcgcgagaagattgtgcaccgccgctttacaggcttcgacgccgcttcgttctaccatcgacaccaccacgctggcacccagttgatcggcgcgagatttaatcgccgcgacaatttgcgacggcgcgtgcagggccagactggaggtggcaacgccaatcagcaacgactgtttgcccgccagttgttgtgccacgcggttgggaatgtaattcagctccgccatcgccgcttccactttttcccgcgttttcgcagaaacgtggctggcctggttcaccacgcgggaaacggtctgataagagacaccggcatactctgcgacatcgtataacgttactggtttcac

SEQ ID NO: 89 - DNA, 13839 bp, synthetic construct
  source 1..13839: mol_type = other DNA
attcaccaccctgaattgactctcttccgggcgctatcatgccataccgcgaaaggttttgcgccattcgatggtgtccgggatctcgacgctctcccttatgcgactcctgcattaggaaattaatacgactcactataggggaattgtgagcggataacaattcccctgtagaaataattttgtttaactttaataaggagatataccatgggtgaactgccgagtaggtagctgataacagtacagcgcggctgaaatcatcattaaagcggtgaactgccgagtaggtagctgataacgaattcgagcgaggaggttacatatgggacctaagaaaaagcgtaaagttggttccggtatgtttttgcaaagacctaaaccttacagcgatgaaagtttagaaagtttctttatccgagtggctaacaaaaatggctacggtgatgtccatcgcttcctagaagccactaaacgattccttcaagacattgaccataatggctatcaaacctttccgactgatataactcggataaacccatactcagctaaaaacagttccagcgcacgaactgcgtcattcctgaaacttgcacaattgacatttaatgaaccgccagagctacttgggttggcaattaacagaacaaacatgaaatactcgccgtcaactagcgcggttgttagaggtgcagaagtctttcctcgcagtttactacggacgcactccatcccctgctgtcctttgtgtctgcgagaaaatggctacgcctcctacctttggcactttcaggggtacgaatactgccacagccataacgtacctttaattaccacttgtagctgtggtaaggagtttgactaccgagtatctgggttaaagggcatttgctgcaaatgcaaggagcctatcaccttaaccagcagggagaacggtcatgaggcagcgtgtactgtttcaaactggcttgctggccatgaatctaaacctctgccaaatcttcctaaaagctaccgatggggtttagttcattggtggatgggtattaaagatagcgagttcgatcacttttcgttcgttcaatttttctcaaactggccaaggtcattccactcgataatcgaagatgaagtagagttcaaccttgagcatgctgttgtcagcacgtctgaattacgactaaaagatcttcttggtcgattgtttttcggttcaattcggttacctgagcggaatcttcaacacaatatcatccttggtgagcttctctgctatttagaaaatcgtttatggcaagacaagggattaatcgccaacctcaaaatgaacgcgttagaggcgactgtaatgttaaattgtagcctcgatcagattgcatcaatggttgaacaacgcatcttgaagccaaatcgaaaaagcaagcccaacagccctcttgatgttaccgattatctatttcatttcggcgatatcttctgtctttggttagctgagttccaaagcgatgagtttaaccgttcgttttatgtgtcgaggtggtaaatgggtcccaagaaaaagcgcaaggtcggtacccgggattccagggaagggatgtttttgccgaagcctgaggccggctccgctattagtgacgtgtttgagggccgcgaggtgtgccagccaaaacgaatccggccatttcatcctccaggaagtccatgggccaaccgcccactccccgccagcctcgcaccaacaccaaccggtccagtacatgagccagtcgggtcactgaccccggcaccagtccctcagccactggatccagcgcccgcagtgactcccgaggccagtcacctgttggaggatcccgatgaagagacgagccaggctgtcaaagcccttcgggagatggccgatactgtgattccccagaaggaagaggctgcaatctgtggccaaatggacctttcccatccgcccccaaggggccatctggatgagctgacaaccacacttgagtccatgaccgaggatctgaacctggactcacccctgaccccggaattgaacgagattctggataccttcctgaacgacgagtgcctcttgcatgccatgcatatcagcacaggactgtccatcttcgacacatctctgttttcgggaggtggttcgggtggctctggatcaagccagtacctgcccgacaccgacgaccggcaccggatcgaggaaaagcggaagcggacctacgagacattcaagagcatcatgaagaagtcccccttcagcggccccaccgaccctagacctccacctagaagaatcgccgtgcccagcagatccagcgccagcgtgccaaaacctgccccccagccttaccccttcaccagcagcctgagcaccatcaactacgacgagttccctaccatggtgttccccagcggccagatctctcaggcctctgctctggctccagcccctcctcaggtgctgcctcaggctcctgctcctgcaccagctccagccatggtgtctgcactggctcaggcaccagcacccgtgcctgtgctggctcctggacctccacaggctgtggctccaccagcccctaaacctacacaggccggcgagggcacactgtctgaagctctgctgcagctgcagttcgacgacgaggatctgggagccctgctgggaaacagcaccgatcctgccgtgttcaccgacctggccagcgtggacaacagcgagttccagcagctgctgaaccagggcatccctgtggcccctcacaccaccgagcccatgctgatggaataccccgaggccatcacccggctcgtgacaggcgctcagaggcctcctgatccagctcctgcccctctgggagcaccaggcctgcctaatggactgctgtctggcgacgaggacttcagctctatcgccgatatggatttctcagccttgctgtcaggcggtggtagtggtgggagcggtagtgaggccagcggttccggacgggctgacgcattggacgattttgatctggatatgctgggaagtgacgccctcgatgattttgaccttgacatgcttggttcggatgcccttgatgactttgacctcgacatgctcggcagtgacgcccttgatgatttcgacctggacatgctgattaactctagaagttccggatctccgaaaaagaaacgcaaagttggtggcgcgcctagtggttcagaaacacccggcacatccgagtccgcgacacctgagagtggaggttctggaggttccggcggtaccggtatgcaaactctgaaagaactaatcgcatccaatcctgacgacttaacaactgaacttaagagagcatttcgtccactcacaccgcatattgcaattgatggtaatgaacttgacgcactgacgatattagtcaatttaaccgataagactgatgatcagaaagacctgctcgatcgagccaaatgcaagcaaaaacttcgagatgaaaaatggtgggctagctgcataaattgcgttaattacagacaaagccataacccaaaattcccggatatacgttctgaaggcgtgattcgaacccaagccctgggtgaattaccgagtttcctactctcgtcctcaaaaatcccaccataccattggtcatatagccatgattcaaaatacgtcaacaaaagcgcattcctcaccaatgagttttgttgggatggtgagatctcatgtttgggtgagcttcttaaagatgcagatcacccactttggaatactttgaaaaagttaggttgttctcaaaaaacttgcaaagcaatggcaaaacaactagctgatattactctcacgactatcaatgtcacactcgcaccaaattacctgactcaaatatctctccccgatagtgatacatcctacatttcactctctcctgttgcatcgctatcgatgcaaagccactttcatcagaggctccaagatgaaaatcggcatagcgcgataacgcggtttagccgaactaccaacatgggggtcactgcgatgacatgtggcggcgcatttagaatgttaaagtctggcgctaagttttccagcccccctcatcaccgattaaacagtaaacgaagttggttgacgtcagagcatgttcagtcattaaaacagtaccagcgcctcaacaaaagcctcatacctgaaaactctcggattgcactccgtagaaaatacaaaatcgagcttcaaaatatggtcagatcttggtttgcaatgcaagaccatacccttgattcgaacatacttatccaacatttgaatcatgacctatcttacttaggagccacaaaacgttttgcatacgatccagcgatgaccaagctctttactgagcttttgaaacgagagttatcaaattcaatcaataatggtgagcaacacactaatggatcgtttttagtcctaccgaatatcagggtttgtggcgcaacagctttaagctccccggtaacggtggggattccatcacttacagctttctttggcttcgttcacgcatttgaacggaatataaatcgcaccacctcatcgtttcgtgttgaatcctttgcgatatgcgtccatcaactacatgtcgagaagcgaggtttgacagcagagtttgtggaaaaaggcgacgggactatatccgctcccgcgacccgggatgactggcagtgtgatgtcgtatttagccttattttgaacaccaactttgctcaacatattgaccaagatacgttagttacatcactaccaaagcgattggctcggggttcagcaaaaattgcgattgatgactttaaacatatcaactcattctcgacattagaaacagcgatcgaatctctgccaatagaagctggtaggtggttatcactttacgcacagtcaaacaataatctaagtgatctattagcagccatgacagaggaccatcagctcatggcaagctgcgtcggttaccacttgttagaggagcccaaagataaaccaaactccctcagaggttacaaacacgctatcgccgagtgcatcattggactcattaactcaatcacctttagctcagagactgatcccaacacaatcttttggtcgctaaagaactatcaaaactacctagtggtacagccaaggagtatcaacgacgaaactaccgacaaatctagcctatgaagcttgaaggaggtaaataatgggcccgaagaaaaagcgaaaagtaggctcgagtatgaaactaccgacaaatctagcctatgagcgctctatcgacccatcagatgtctgtttttttgtcgtctggcccgatgatagaaaaacacctttaacctacaattctcgtactctgctcgggcaaatggaagcggcatcattagcctatgatgtctcaggtcaaccaataaaaagtgccaccgctgaggcgttagctcaagggaaccctcatcaagttgatttctgccacgttccatacggtgcgagtcatattgaatgcagtttctccgtctcgttttcttctgaactacgtcaaccatataagtgtaactcaagcaaagttaaacaaacgctagtgcaattagtcgaactctacgaaacgaaaatcggctggactgagctagcaacccgatatttgatgaacatttgcaacggtaaatggctgtggaaaaatacccgtaaagcctattgctggaacattgtacttacaccttggccttggaacggggaaaaggttggatttgaagatattcgtactaactacacctcacggcaagactttaaaaataataaaaattggtctgctatagttgaaatgatcaaaaccgcattttctagtactgatgggctggcgatatttgaagtcagggccaccttgcacttgccaacgaatgctatggtgcggccaagccaagttttcacagaaaaagaaagtggcagtaaaagtaaatctaaaactcaaaacagtcgagtttttcagagtacaactattgatggtgaacgatcgccaatactaggggcctttaaaacgggagcagctattgcaaccattgacgactggtatcctgaagccactgagccactaagggtcggacggtttggggttcatcgcgaagatgtcacttgctaccgtcatccgtctaccggaaaagattttttctcgatattacaacaagcagagcactatattgaagtgttgagcgccaacaaaactcccgctcaagaaactatcaacgacatgcactttttaatggctaacctgattaagggtgggatgttccagcataaaggagactgactatggggcctaagaaaaagcggaaggtgggttccggagtgaaatggtattataagacaatcacctttctgccagagttgtgcaacaacgagtcactggctgcaaagtgtctccgcgttctgcatggatttaactatcagtatgagacacgaaatatcggcgtttcatttccgctttggtgtgatgcaacggttggaaaaaagatttcatttgtcagcaagaacaagatagaactcgacttactacttaaacaacactatttcgtccaaatggaacaacttcaatactttcatatatccaacactgttctcgtcccagaagattgtacatacgtttcctttagacgctgtcaatctatagataagctcacagcagcagggctggcaaggaaaatcagacgcctggagaaacgtgctctatctagaggcgagcaatttgacccatcatcttttgctcaaaaagagcatactgcaatagcgcactaccactcacttggggagtccagcaaacagacgaaccgcaactttcgactcaatatcaggatgctctcggagcaaccccgtgaggggaactcgatttttagtagctatggcttatcaaattcagaaaactcgtttcagcctgtacccttaatctgagtcgacataaggagatatatcatggcgacaagtttacctacgccctcagcaattacgacttcggcgttagagtatgcattccatactcccgctcgcaatctaacgaaatctcgcggaaaaaacattcatcgttatgtcagtgtaaagatgagtaagaggattacggtagaatctactctagagtgtgatgcctgctatcactttgattttgagccaagtattgttcgcttttgcgcacaaccgattcgatttttatattatctcaatggtcagtctcactcctatgttcctgactttctagttcaatttgataccaacgagtttgttctatatgaagtaaagtcagcttatgctaagaacaaacctgattttgatgttgaatgggaggcgaaagtaaaagcagcaactgaactagggctagaattggagcttgttgaagagagtgatattagggatacggttgtattaaataatcttaagcgcatgcatcgttatgcttcgaaagatgagctgaataacgtacataactctctcttaaaaataataaagtacaatggcgcccaatctgcaagatgcttgggagaacagttgggtttaaaaggccgaactgttttaccaattttgtgcgatttgctgtcaaggtgtttactcgatacacgtttggataagcctctatctcttgaatctcgatttgagttggcctcgtacggcggttcacccaagaaaaagcgcaaggtctaactagtaggaggctcgagatgggaccgaagaaaaagagaaaagtgggatccgcgatggctaagaaagggttctcaagtttccatagaaaagcagtctcttcccaagatacgcttgaatcgatagagcttgtctctagcgctaattgtctagaaagtgttacgtatcaagatatatcagcatttcccgaaacaattgcggtagagattaatttccgattaagcattcttcgctttttagcgcgaaagtgcgaaaccattgtggccaaatcaattgaaccacatcgtgtagagctacagcaaaactatagtagaaaaatacccagtgcaataacgatatatcgatggtggcttgcttttcgaaaatcagactacaaccccattagcttagcacctaatatcaaggatagaggtaatagagagacaaaagtgtcaacagttgttgattctattatggaacaggcagttgaaagagttatatctggacgaaaagtcaatgttagctctgcatataaacgtgttcgacgaaaagttcgtcaatacaatctaactcatggaacgaaatacacgtatcctaagtacgaatctgtaagaaagcgagtaaaaaagaaaaccccatttgagttattagccgcagggaaaggggagagagtagctaagagagagtttcgccgaatgggaaaaaagatcctcacgtctagcgtgctagagagggttgaaatagatcacactgtcgttgacctttttgcagtacacgaagagtatcgaatcccattgggccgaccttggcttactcaattggttgattgttacagtaaagctgtaatcggtttttatttaggtttcgagcctcctagctatgtgtcggtttcccttgcacttaagaatgcaatacaacgcaaagatgacttaatctcctcgtatgaatcgatcgagaatgaatggctatgttatggcatcccagacctactcgtaactgataatggtaaagagtttttgtcgaaagcatttgatcaagcatgtgaatcactattgatcaatgtgcatcaaaataaagttgagacgcccgacaacaaacctcatgttgaacgtaactacgggactattaatacttctctgttagacgatttacctgggaaatccttcagccagtaccttcaaagagaagggtacgactctgtgggagaagctacccttacactcaatgagattagagaaatttacttaatttggttggtggatatttatcataaaaaacccaatcagagaggcactaattgtcctaatgttgcgtggaaaaagggttgtcaagaatgggaaccagaggagttctctggttctaaagacgaattagactttaaatttgctattgttgattacaaacaacttactaaagtagggataactgtctacaaagaactgagttatagcaatgaccgtttagctgaatatagagggaagaaaggaaaccataaagttcagttcaagtataaccctgagtgtatggcagttatttgggtgttggatgaggatatgaatgagtactttacagttaatgcgattgactacgaatatgcaagtagagtatcactttggcaacataaatataacatgaaatatcaagcagaactaaattcagcagaatatgatgaggacaaggaaattgatgcagaaataaaaattgaagaaatcgcagatcgttcaattgttaagactaacaaaatcagagctcggaggcgtggcgctaggcatcaagagaatagcgcaagggctaagtcaatcagtaatgcgaacccggcctcgatacaaaaacatgaagatgaaatcgttagtgcagataatgacgattgggatattgattatgtctgagaaatcgtcaaatgggtcctaagaaaaagaggaaagtaggctcttccatgagtgaaacgcgtgaggctcgtatatcaagagctaaaagggcatttgtatccacaccgagcgttaggaaaatcttgagttacatggatagatgtagagatctatcagacctagagtctgagcctacatgcatgatggtctatggtgcttcgggtgtaggtaaaacgaccgtcatcaagaaatacttaaatcaaaacagaagagagtccgaagccgggggcgatataataccggttttgcatattgagttgccagacaatgcgaagccagtagatgcagcaagggaattgctggttgaaatgggtgacccgctagcactttatgaaactgacttagctagattgacgaaaagactgactgaattaatccctgcggtcggcgtgaagctgattattatcgatgagttccaacatttggtggaagaaaggtcaaatcgggttcttacccaagtaggtaattggctaaaaatgatacttaacaaaacgaaatgtccaattgttatatttggtatgccatactcaaaagttgtactgcaagcaaactcgcaacttcacgggcgattttccattcaggttgaactgcgcccctttagctaccagggaggtagaggtgtatttaaaacttttttggaataccttgataaagccctaccttttgaaaaacaggctggcttagccaacgaaagtttgcagaaaaaattgtatgcattctctcagggaaacatgcgttcgttgagaaaccttatttatcaagcatctatcgaagcaattgataatcagcatgagacgataaccgaagaagatttcgtttttgcatcgaagttgacatcgggcgataaacccaactcatggaaaaatccttttgaggagggtgttgaggtaacagaagatatgttacgaccgccaccaaaagatattggttgggaggactatttgagacattcaaccccgagagtgagtaaaccaggtagaaataaaaactttttcgaataacctaggctgctgcgctgctgccaccgctgagcaataactagcataaccccttggggcctctaaacgggtcttgaggggttttttgctgaaacctcaggcatttgagaagcacacggtcacactgcttccggtagtcaataaaccggtaaaccagcaatagacataagcggctatttaacgaccctgccctgaaccgacgaccgggtcatcgtggccggatcttgcggcccctcggcttgaacgaattgttagacattatttgccgactaccttggtgatctcgcctttcacgtagtggacaaattcttccaactgatctgcgcgcgaggccaagcgatcttcttcttgtccaagataagcctgtctagcttcaagtatgacgggctgatactgggccggcaggcgctccattgcccagtcggcagcgacatccttcggcgcgattttgccggttactgcgctgtaccaaatgcgggacaacgtaagcactacatttcgctcatcgccagcccagtcgggcggcgagttccatagcgttaaggtttcatttagcgcctcaaatagatcctgttcaggaaccggatcaaagagttcctccgccgctggacctaccaaggcaacgctatgttctcttgcttttgtcagcaagatagccagatcaatgtcgatcgtggctggctcgaagatacctgcaagaatgtcattgcgctgccattctccaaattgcagttcgcgcttagctggataacgccacggaatgatgtcgtcgtgcacaacaatggtgacttctacagcgcggagaatctcgctctctccaggggaagccgaagtttccaaaaggtcgttgatcaaagctcgccgcgttgtttcatcaagccttacggtcaccgtaaccagcaaatcaatatcactgtgtggcttcaggccgccatccactgcggagccgtacaaatgtacggccagcaacgtcggttcgagatggcgctcgatgacgccaactacctctgatagttgagtcgatacttcggcgatcaccgcttccctcatactcttcctttttcaatattattgaagcatttatcagggttattgtctcatgagcggatacatatttgaatgtatttagaaaaataaacaaatagctagctcactcggtcgctacgctccgggcgtgagactgcggcgggcgctgcggacacatacaaagttacccacagattccgtggataagcaggggactaacatgtgaggcaaaacagcagggccgcgccggtggcgtttttccataggctccgccctcctgccagagttcacataaacagacgcttttccggtgcatctgtgggagccgtgaggctcaaccatgaatctgacagtacgggcgaaacccgacaggacttaaagatccccaccgtttccggcgggtcgctccctcttgcgctctcctgttccgaccctgccgtttaccggatacctgttccgcctttctcccttacgggaagtgtggcgctttctcatagctcacacactggtatctcggctcggtgtaggtcgttcgctccaagctgggctgtaagcaagaactccccgttcagcccgactgctgcgccttatccggtaactgttcacttgagtccaacccggaaaagcacggtaaaacgccactggcagcagccattggtaactgggagttcgcagaggatttgtttagctaaacacgcggttgctcttgaagtgtgcgccaaagtccggctacactggaaggacagatttggttgctgtgctctgcgaaagccagttaccacggttaagcagttccccaactgacttaaccttcgatcaaaccacctccccaggtggttttttcgtttacagggcaaaagattacgcgcagaaaaaaaggatctcaagaagatcctttgatcttttctactgaaccgctctagatttcagtgcaatttatctcttcaaatgtagcacctgaagtcagccccatacgatataagttgtaattctcatgttagtcatgccccgcgcccaccggaaggagctgactgggttgaaggctctcaagggcatcggtcgagatcccggtgcctaatgagtgagctaacttacattaattgcgttgcgctcactgcccgctttccagtcgggaaacctgtcgtgccagctgcattaatgaatcggccaacgcgcggggagaggcggtttgcgtattgggcgccagggtggtttttcttttcaccagtgagacgggcaacagctgattgcccttcaccgcctggccctgagagagttgcagcaagcggtccacgctggtttgccccagcaggcgaaaatcctgtttgatggtggttaacggcgggatataacatgagctgtcttcggtatcgtcgtatcccactaccgagatgtccgcaccaacgcgcagcccggactcggtaatggcgcgcattgcgcccagcgccatctgatcgttggcaaccagcatcgcagtgggaacgatgccctcattcagcatttgcatggtttgttgaaaaccggacatggcactccagtcgccttcccgttccgctatcggctgaatttgattgcgagtgagatatttatgccagccagccagacgcagacgcgccgagacagaacttaatgggcccgctaacagcgcgatttgctggtgacccaatgcgaccagatgctccacgcccagtcgcgtaccgtcttcatgggagaaaataatactgttgatgggtgtctggtcagagacatcaagaaataacgccggaacattagtgcaggcagcttccacagcaatggcatcctggtcatccagcggatagttaatgatcagcccactgacgcgttgcgcgagaagattgtgcaccgccgctttacaggcttcgacgccgcttcgttctaccatcgacaccaccacgctggcacccagttgatcggcgcgagatttaatcgccgcgacaatttgcgacggcgcgtgcagggccagactggaggtggcaacgccaatcagcaacgactgtttgcccgccagttgttgtgccacgcggttgggaatgtaattcagctccgccatcgccgcttccactttttcccgcgttttcgcagaaacgtggctggcctggttcaccacgcgggaaacggtctgataagagacaccggcatactctgcgacatcgtataacgttactggtttcac

SEQ ID NO: 90 - DNA, 12372 bp, synthetic construct
  source 1..12372: mol_type = other DNA
attcaccaccctgaattgactctcttccgggcgctatcatgccataccgcgaaaggttttgcgccattcgatggtgtccgggatctcgacgctctcccttatgcgactcctgcattaggaaattaatacgactcactataggggaattgtgagcggataacaattcccctgtagaaataattttgtttaactttaataaggagatataccatgggtgaactgccgagtaggtagctgataacagtacagcgcggctgaaatcatcattaaagcggtgaactgccgagtaggtagctgataacgaattcgagcgaggaggttacatatgggacctaagaaaaagcgtaaagttggttccggtatgtttttgcaaagacctaaaccttacagcgatgaaagtttagaaagtttctttatccgagtggctaacaaaaatggctacggtgatgtccatcgcttcctagaagccactaaacgattccttcaagacattgaccataatggctatcaaacctttccgactgatataactcggataaacccatactcagctaaaaacagttccagcgcacgaactgcgtcattcctgaaacttgcacaattgacatttaatgaaccgccagagctacttgggttggcaattaacagaacaaacatgaaatactcgccgtcaactagcgcggttgttagaggtgcagaagtctttcctcgcagtttactacggacgcactccatcccctgctgtcctttgtgtctgcgagaaaatggctacgcctcctacctttggcactttcaggggtacgaatactgccacagccataacgtacctttaattaccacttgtagctgtggtaaggagtttgactaccgagtatctgggttaaagggcatttgctgcaaatgcaaggagcctatcaccttaaccagcagggagaacggtcatgaggcagcgtgtactgtttcaaactggcttgctggccatgaatctaaacctctgccaaatcttcctaaaagctaccgatggggtttagttcattggtggatgggtattaaagatagcgagttcgatcacttttcgttcgttcaatttttctcaaactggccaaggtcattccactcgataatcgaagatgaagtagagttcaaccttgagcatgctgttgtcagcacgtctgaattacgactaaaagatcttcttggtcgattgtttttcggttcaattcggttacctgagcggaatcttcaacacaatatcatccttggtgagcttctctgctatttagaaaatcgtttatggcaagacaagggattaatcgccaacctcaaaatgaacgcgttagaggcgactgtaatgttaaattgtagcctcgatcagattgcatcaatggttgaacaacgcatcttgaagccaaatcgaaaaagcaagcccaacagccctcttgatgttaccgattatctatttcatttcggcgatatcttctgtctttggttagctgagttccaaagcgatgagtttaaccgttcgttttatgtgtcgaggtggtaaatgggtcccaagaaaaagcgcaaggtcggtaccggtatgcaaactctgaaagaactaatcgcatccaatcctgacgacttaacaactgaacttaagagagcatttcgtccactcacaccgcatattgcaattgatggtaatgaacttgacgcactgacgatattagtcaatttaaccgataagactgatgatcagaaagacctgctcgatcgagccaaatgcaagcaaaaacttcgagatgaaaaatggtgggctagctgcataaattgcgttaattacagacaaagccataacccaaaattcccggatatacgttctgaaggcgtgattcgaacccaagccctgggtgaattaccgagtttcctactctcgtcctcaaaaatcccaccataccattggtcatatagccatgattcaaaatacgtcaacaaaagcgcattcctcaccaatgagttttgttgggatggtgagatctcatgtttgggtgagcttcttaaagatgcagatcacccactttggaatactttgaaaaagttaggttgttctcaaaaaacttgcaaagcaatggcaaaacaactagctgatattactctcacgactatcaatgtcacactcgcaccaaattacctgactcaaatatctctccccgatagtgatacatcctacatttcactctctcctgttgcatcgctatcgatgcaaagccactttcatcagaggctccaagatgaaaatcggcatagcgcgataacgcggtttagccgaactaccaacatgggggtcactgcgatgacatgtggcggcgcatttagaatgttaaagtctggcgctaagttttccagcccccctcatcaccgattaaacagtaaacgaagttggttgacgtcagagcatgttcagtcattaaaacagtaccagcgcctcaacaaaagcctcatacctgaaaactctcggattgcactccgtagaaaatacaaaatcgagcttcaaaatatggtcagatcttggtttgcaatgcaagaccatacccttgattcgaacatacttatccaacatttgaatcatgacctatcttacttaggagccacaaaacgttttgcatacgatccagcgatgaccaagctctttactgagcttttgaaacgagagttatcaaattcaatcaataatggtgagcaacacactaatggatcgtttttagtcctaccgaatatcagggtttgtggcgcaacagctttaagctccccggtaacggtggggattccatcacttacagctttctttggcttcgttcacgcatttgaacggaatataaatcgcaccacctcatcgtttcgtgttgaatcctttgcgatatgcgtccatcaactacatgtcgagaagcgaggtttgacagcagagtttgtggaaaaaggcgacgggactatatccgctcccgcgacccgggatgactggcagtgtgatgtcgtatttagccttattttgaacaccaactttgctcaacatattgaccaagatacgttagttacatcactaccaaagcgattggctcggggttcagcaaaaattgcgattgatgactttaaacatatcaactcattctcgacattagaaacagcgatcgaatctctgccaatagaagctggtaggtggttatcactttacgcacagtcaaacaataatctaagtgatctattagcagccatgacagaggaccatcagctcatggcaagctgcgtcggttaccacttgttagaggagcccaaagataaaccaaactccctcagaggttacaaacacgctatcgccgagtgcatcattggactcattaactcaatcacctttagctcagagactgatcccaacacaatcttttggtcgctaaagaactatcaaaactacctagtggtacagccaaggagtatcaacgacgaaactaccgacaaatctagcctatgaagcttgaaggaggtaaataatgggcccgaagaaaaagcgaaaagtaggcgaggccagcggttccggacgggctgacgcattggacgattttgatctggatatgctgggaagtgacgccctcgatgattttgaccttgacatgcttggttcggatgcccttgatgactttgacctcgacatgctcggcagtgacgcccttgatgatttcgacctggacatgctgattaactctagaggcgcgcctagtggttcagaaacacccggcacatccgagtccgcgacacctgagagtggaggttctgggagtatgaaactaccgacaaatctagcctatgagcgctctatcgacccatcagatgtctgtttttttgtcgtctggcccgatgatagaaaaacacctttaacctacaattctcgtactctgctcgggcaaatggaagcggcatcattagcctatgatgtctcaggtcaaccaataaaaagtgccaccgctgaggcgttagctcaagggaaccctcatcaagttgatttctgccacgttccatacggtgcgagtcatattgaatgcagtttctccgtctcgttttcttctgaactacgtcaaccatataagtgtaactcaagcaaagttaaacaaacgctagtgcaattagtcgaactctacgaaacgaaaatcggctggactgagctagcaacccgatatttgatgaacatttgcaacggtaaatggctgtggaaaaatacccgtaaagcctattgctggaacattgtacttacaccttggccttggaacggggaaaaggttggatttgaagatattcgtactaactacacctcacggcaagactttaaaaataataaaaattggtctgctatagttgaaatgatcaaaaccgcattttctagtactgatgggctggcgatatttgaagtcagggccaccttgcacttgccaacgaatgctatggtgcggccaagccaagttttcacagaaaaagaaagtggcagtaaaagtaaatctaaaactcaaaacagtcgagtttttcagagtacaactattgatggtgaacgatcgccaatactaggggcctttaaaacgggagcagctattgcaaccattgacgactggtatcctgaagccactgagccactaagggtcggacggtttggggttcatcgcgaagatgtcacttgctaccgtcatccgtctaccggaaaagattttttctcgatattacaacaagcagagcactatattgaagtgttgagcgccaacaaaactcccgctcaagaaactatcaacgacatgcactttttaatggctaacctgattaagggtgggatgttccagcataaaggagactgactatggggcctaagaaaaagcggaaggtgggttccggagtgaaatggtattataagacaatcacctttctgccagagttgtgcaacaacgagtcactggctgcaaagtgtctccgcgttctgcatggatttaactatcagtatgagacacgaaatatcggcgtttcatttccgctttggtgtgatgcaacggttggaaaaaagatttcatttgtcagcaagaacaagatagaactcgacttactacttaaacaacactatttcgtccaaatggaacaacttcaatactttcatatatccaacactgttctcgtcccagaagattgtacatacgtttcctttagacgctgtcaatctatagataagctcacagcagcagggctggcaaggaaaatcagacgcctggagaaacgtgctctatctagaggcgagcaatttgacccatcatcttttgctcaaaaagagcatactgcaatagcgcactaccactcacttggggagtccagcaaacagacgaaccgcaactttcgactcaatatcaggatgctctcggagcaaccccgtgaggggaactcgatttttagtagctatggcttatcaaattcagaaaactcgtttcagcctgtacccttaatctgagtcgacataaggagatatatcatggcgacaagtttacctacgccctcagcaattacgacttcggcgttagagtatgcattccatactcccgctcgcaatctaacgaaatctcgcggaaaaaacattcatcgttatgtcagtgtaaagatgagtaagaggattacggtagaatctactctagagtgtgatgcctgctatcactttgattttgagccaagtattgttcgcttttgcgcacaaccgattcgatttttatattatctcaatggtcagtctcactcctatgttcctgactttctagttcaatttgataccaacgagtttgttctatatgaagtaaagtcagcttatgctaagaacaaacctgattttgatgttgaatgggaggcgaaagtaaaagcagcaactgaactagggctagaattggagcttgttgaagagagtgatattagggatacggttgtattaaataatcttaagcgcatgcatcgttatgcttcgaaagatgagctgaataacgtacataactctctcttaaaaataataaagtacaatggcgcccaatctgcaagatgcttgggagaacagttgggtttaaaaggccgaactgttttaccaattttgtgcgatttgctgtcaaggtgtttactcgatacacgtttggataagcctctatctcttgaatctcgatttgagttggcctcgtacggcggttcacccaagaaaaagcgcaaggtctaactagtaggaggctcgagatgggaccgaagaaaaagagaaaagtgggatccgcgatggctaagaaagggttctcaagtttccatagaaaagcagtctcttcccaagatacgcttgaatcgatagagcttgtctctagcgctaattgtctagaaagtgttacgtatcaagatatatcagcatttcccgaaacaattgcggtagagattaatttccgattaagcattcttcgctttttagcgcgaaagtgcgaaaccattgtggccaaatcaattgaaccacatcgtgtagagctacagcaaaactatagtagaaaaatacccagtgcaataacgatatatcgatggtggcttgcttttcgaaaatcagactacaaccccattagcttagcacctaatatcaaggatagaggtaatagagagacaaaagtgtcaacagttgttgattctattatggaacaggcagttgaaagagttatatctggacgaaaagtcaatgttagctctgcatataaacgtgttcgacgaaaagttcgtcaatacaatctaactcatggaacgaaatacacgtatcctaagtacgaatctgtaagaaagcgagtaaaaaagaaaaccccatttgagttattagccgcagggaaaggggagagagtagctaagagagagtttcgccgaatgggaaaaaagatcctcacgtctagcgtgctagagagggttgaaatagatcacactgtcgttgacctttttgcagtacacgaagagtatcgaatcccattgggccgaccttggcttactcaattggttgattgttacagtaaagctgtaatcggtttttatttaggtttcgagcctcctagctatgtgtcggtttcccttgcacttaagaatgcaatacaacgcaaagatgacttaatctcctcgtatgaatcgatcgagaatgaatggctatgttatggcatcccagacctactcgtaactgataatggtaaagagtttttgtcgaaagcatttgatcaagcatgtgaatcactattgatcaatgtgcatcaaaataaagttgagacgcccgacaacaaacctcatgttgaacgtaactacgggactattaatacttctctgttagacgatttacctgggaaatccttcagccagtaccttcaaagagaagggtacgactctgtgggagaagctacccttacactcaatgagattagagaaatttacttaatttggttggtggatatttatcataaaaaacccaatcagagaggcactaattgtcctaatgttgcgtggaaaaagggttgtcaagaatgggaaccagaggagttctctggttctaaagacgaattagactttaaatttgctattgttgattacaaacaacttactaaagtagggataactgtctacaaagaactgagttatagcaatgaccgtttagctgaatatagagggaagaaaggaaaccataaagttcagttcaagtataaccctgagtgtatggcagttatttgggtgttggatgaggatatgaatgagtactttacagttaatgcgattgactacgaatatgcaagtagagtatcactttggcaacataaatataacatgaaatatcaagcagaactaaattcagcagaatatgatgaggacaaggaaattgatgcagaaataaaaattgaagaaatcgcagatcgttcaattgttaagactaacaaaatcagagctcggaggcgtggcgctaggcatcaagagaatagcgcaagggctaagtcaatcagtaatgcgaacccggcctcgatacaaaaacatgaagatgaaatcgttagtgcagataatgacgattgggatattgattatgtctgagaaatcgtcaaatgggtcctaagaaaaagaggaaagtaggctcttccatgagtgaaacgcgtgaggctcgtatatcaagagctaaaagggcatttgtatccacaccgagcgttaggaaaatcttgagttacatggatagatgtagagatctatcagacctagagtctgagcctacatgcatgatggtctatggtgcttcgggtgtaggtaaaacgaccgtcatcaagaaatacttaaatcaaaacagaagagagtccgaagccgggggcgatataataccggttttgcatattgagttgccagacaatgcgaagccagtagatgcagcaagggaattgctggttgaaatgggtgacccgctagcactttatgaaactgacttagctagattgacgaaaagactgactgaattaatccctgcggtcggcgtgaagctgattattatcgatgagttccaacatttggtggaagaaaggtcaaatcgggttcttacccaagtaggtaattggctaaaaatgatacttaacaaaacgaaatgtccaattgttatatttggtatgccatactcaaaagttgtactgcaagcaaactcgcaacttcacgggcgattttccattcaggttgaactgcgcccctttagctaccagggaggtagaggtgtatttaaaacttttttggaataccttgataaagccctaccttttgaaaaacaggctggcttagccaacgaaagtttgcagaaaaaattgtatgcattctctcagggaaacatgcgttcgttgagaaaccttatttatcaagcatctatcgaagcaattgataatcagcatgagacgataaccgaagaagatttcgtttttgcatcgaagttgacatcgggcgataaacccaactcatggaaaaatccttttgaggagggtgttgaggtaacagaagatatgttacgaccgccaccaaaagatattggttgggaggactatttgagacattcaaccccgagagtgagtaaaccaggtagaaataaaaactttttcgaataacctaggctgctgcgctgctgccaccgctgagcaataactagcataaccccttggggcctctaaacgggtcttgaggggttttttgctgaaacctcaggcatttgagaagcacacggtcacactgcttccggtagtcaataaaccggtaaaccagcaatagacataagcggctatttaacgaccctgccctgaaccgacgaccgggtcatcgtggccggatcttgcggcccctcggcttgaacgaattgttagacattatttgccgactaccttggtgatctcgcctttcacgtagtggacaaattcttccaactgatctgcgcgcgaggccaagcgatcttcttcttgtccaagataagcctgtctagcttcaagtatgacgggctgatactgggccggcaggcgctccattgcccagtcggcagcgacatccttcggcgcgattttgccggttactgcgctgtaccaaatgcgggacaacgtaagcactacatttcgctcatcgccagcccagtcgggcggcgagttccatagcgttaaggtttcatttagcgcctcaaatagatcctgttcaggaaccggatcaaagagttcctccgccgctggacctaccaaggcaacgctatgttctcttgcttttgtcagcaagatagccagatcaatgtcgatcgtggctggctcgaagatacctgcaagaatgtcattgcgctgccattctccaaattgcagttcgcgcttagctggataacgccacggaatgatgtcgtcgtgcacaacaatggtgacttctacagcgcggagaatctcgctctctccaggggaagccgaagtttccaaaaggtcgttgatcaaagctcgccgcgttgtttcatcaagccttacggtcaccgtaaccagcaaatcaatatcactgtgtggcttcaggccgccatccactgcggagccgtacaaatgtacggccagcaacgtcggttcgagatggcgctcgatgacgccaactacctctgatagttgagtcgatacttcggcgatcaccgcttccctcatactcttcctttttcaatattattgaagcatttatcagggttattgtctcatgagcggatacatatttgaatgtatttagaaaaataaacaaatagctagctcactcggtcgctacgctccgggcgtgagactgcggcgggcgctgcggacacatacaaagttacccacagattccgtggataagcaggggactaacatgtgaggcaaaacagcagggccgcgccggtggcgtttttccataggctccgccctcctgccagagttcacataaacagacgcttttccggtgcatctgtgggagccgtgaggctcaaccatgaatctgacagtacgggcgaaacccgacaggacttaaagatccccaccgtttccggcgggtcgctccctcttgcgctctcctgttccgaccctgccgtttaccggatacctgttccgcctttctcccttacgggaagtgtggcgctttctcatagctcacacactggtatctcggctcggtgtaggtcgttcgctccaagctgggctgtaagcaagaactccccgttcagcccgactgctgcgccttatccggtaactgttcacttgagtccaacccggaaaagcacggtaaaacgccactggcagcagccattggtaactgggagttcgcagaggatttgtttagctaaacacgcggttgctcttgaagtgtgcgccaaagtccggctacactggaaggacagatttggttgctgtgctctgcgaaagccagttaccacggttaagcagttccccaactgacttaaccttcgatcaaaccacctccccaggtggttttttcgtttacagggcaaaagattacgcgcagaaaaaaaggatctcaagaagatcctttgatcttttctactgaaccgctctagatttcagtgcaatttatctcttcaaatgtagcacctgaagtcagccccatacgatataagttgtaattctcatgttagtcatgccccgcgcccaccggaaggagctgactgggttgaaggctctcaagggcatcggtcgagatcccggtgcctaatgagtgagctaacttacattaattgcgttgcgctcactgcccgctttccagtcgggaaacctgtcgtgccagctgcattaatgaatcggccaacgcgcggggagaggcggtttgcgtattgggcgccagggtggtttttcttttcaccagtgagacgggcaacagctgattgcccttcaccgcctggccctgagagagttgcagcaagcggtccacgctggtttgccccagcaggcgaaaatcctgtttgatggtggttaacggcgggatataacatgagctgtcttcggtatcgtcgtatcccactaccgagatgtccgcaccaacgcgcagcccggactcggtaatggcgcgcattgcgcccagcgccatctgatcgttggcaaccagcatcgcagtgggaacgatgccctcattcagcatttgcatggtttgttgaaaaccggacatggcactccagtcgccttcccgttccgctatcggctgaatttgattgcgagtgagatatttatgccagccagccagacgcagacgcgccgagacagaacttaatgggcccgctaacagcgcgatttgctggtgacccaatgcgaccagatgctccacgcccagtcgcgtaccgtcttcatgggagaaaataatactgttgatgggtgtctggtcagagacatcaagaaataacgccggaacattagtgcaggcagcttccacagcaatggcatcctggtcatccagcggatagttaatgatcagcccactgacgcgttgcgcgagaagattgtgcaccgccgctttacaggcttcgacgccgcttcgttctaccatcgacaccaccacgctggcacccagttgatcggcgcgagatttaatcgccgcgacaatttgcgacggcgcgtgcagggccagactggaggtggcaacgccaatcagcaacgactgtttgcccgccagttgttgtgccacgcggttgggaatgtaattcagctccgccatcgccgcttccactttttcccgcgttttcgcagaaacgtggctggcctggttcaccacgcgggaaacggtctgataagagacaccggcatactctgcgacatcgtataacgttactggtttcac

SEQ ID NO: 91 - DNA, 13833 bp, synthetic construct
  source 1..13833: mol_type = other DNA
attcaccaccctgaattgactctcttccgggcgctatcatgccataccgcgaaaggttttgcgccattcgatggtgtccgggatctcgacgctctcccttatgcgactcctgcattaggaaattaatacgactcactataggggaattgtgagcggataacaattcccctgtagaaataattttgtttaactttaataaggagatataccatgggtgaactgccgagtaggtagctgataacagtacagcgcggctgaaatcatcattaaagcggtgaactgccgagtaggtagctgataacgaattcgagcgaggaggttacatatgggacctaagaaaaagcgtaaagttggttccggtatgtttttgcaaagacctaaaccttacagcgatgaaagtttagaaagtttctttatccgagtggctaacaaaaatggctacggtgatgtccatcgcttcctagaagccactaaacgattccttcaagacattgaccataatggctatcaaacctttccgactgatataactcggataaacccatactcagctaaaaacagttccagcgcacgaactgcgtcattcctgaaacttgcacaattgacatttaatgaaccgccagagctacttgggttggcaattaacagaacaaacatgaaatactcgccgtcaactagcgcggttgttagaggtgcagaagtctttcctcgcagtttactacggacgcactccatcccctgctgtcctttgtgtctgcgagaaaatggctacgcctcctacctttggcactttcaggggtacgaatactgccacagccataacgtacctttaattaccacttgtagctgtggtaaggagtttgactaccgagtatctgggttaaagggcatttgctgcaaatgcaaggagcctatcaccttaaccagcagggagaacggtcatgaggcagcgtgtactgtttcaaactggcttgctggccatgaatctaaacctctgccaaatcttcctaaaagctaccgatggggtttagttcattggtggatgggtattaaagatagcgagttcgatcacttttcgttcgttcaatttttctcaaactggccaaggtcattccactcgataatcgaagatgaagtagagttcaaccttgagcatgctgttgtcagcacgtctgaattacgactaaaagatcttcttggtcgattgtttttcggttcaattcggttacctgagcggaatcttcaacacaatatcatccttggtgagcttctctgctatttagaaaatcgtttatggcaagacaagggattaatcgccaacctcaaaatgaacgcgttagaggcgactgtaatgttaaattgtagcctcgatcagattgcatcaatggttgaacaacgcatcttgaagccaaatcgaaaaagcaagcccaacagccctcttgatgttaccgattatctatttcatttcggcgatatcttctgtctttggttagctgagttccaaagcgatgagtttaaccgttcgttttatgtgtcgaggtggtaaatgggtcccaagaaaaagcgcaaggtcggtaccggtatgcaaactctgaaagaactaatcgcatccaatcctgacgacttaacaactgaacttaagagagcatttcgtccactcacaccgcatattgcaattgatggtaatgaacttgacgcactgacgatattagtcaatttaaccgataagactgatgatcagaaagacctgctcgatcgagccaaatgcaagcaaaaacttcgagatgaaaaatggtgggctagctgcataaattgcgttaattacagacaaagccataacccaaaattcccggatatacgttctgaaggcgtgattcgaacccaagccctgggtgaattaccgagtttcctactctcgtcctcaaaaatcccaccataccattggtcatatagccatgattcaaaatacgtcaacaaaagcgcattcctcaccaatgagttttgttgggatggtgagatctcatgtttgggtgagcttcttaaagatgcagatcacccactttggaatactttgaaaaagttaggttgttctcaaaaaacttgcaaagcaatggcaaaacaactagctgatattactctcacgactatcaatgtcacactcgcaccaaattacctgactcaaatatctctccccgatagtgatacatcctacatttcactctctcctgttgcatcgctatcgatgcaaagccactttcatcagaggctccaagatgaaaatcggcatagcgcgataacgcggtttagccgaactaccaacatgggggtcactgcgatgacatgtggcggcgcatttagaatgttaaagtctggcgctaagttttccagcccccctcatcaccgattaaacagtaaacgaagttggttgacgtcagagcatgttcagtcattaaaacagtaccagcgcctcaacaaaagcctcatacctgaaaactctcggattgcactccgtagaaaatacaaaatcgagcttcaaaatatggtcagatcttggtttgcaatgcaagaccatacccttgattcgaacatacttatccaacatttgaatcatgacctatcttacttaggagccacaaaacgttttgcatacgatccagcgatgaccaagctctttactgagcttttgaaacgagagttatcaaattcaatcaataatggtgagcaacacactaatggatcgtttttagtcctaccgaatatcagggtttgtggcgcaacagctttaagctccccggtaacggtggggattccatcacttacagctttctttggcttcgttcacgcatttgaacggaatataaatcgcaccacctcatcgtttcgtgttgaatcctttgcgatatgcgtccatcaactacatgtcgagaagcgaggtttgacagcagagtttgtggaaaaaggcgacgggactatatccgctcccgcgacccgggatgactggcagtgtgatgtcgtatttagccttattttgaacaccaactttgctcaacatattgaccaagatacgttagttacatcactaccaaagcgattggctcggggttcagcaaaaattgcgattgatgactttaaacatatcaactcattctcgacattagaaacagcgatcgaatctctgccaatagaagctggtaggtggttatcactttacgcacagtcaaacaataatctaagtgatctattagcagccatgacagaggaccatcagctcatggcaagctgcgtcggttaccacttgttagaggagcccaaagataaaccaaactccctcagaggttacaaacacgctatcgccgagtgcatcattggactcattaactcaatcacctttagctcagagactgatcccaacacaatcttttggtcgctaaagaactatcaaaactacctagtggtacagccaaggagtatcaacgacgaaactaccgacaaatctagcctatgaagcttgaaggaggtaaataatgggcccgaagaaaaagcgaaaagtaggccgggattccagggaagggatgtttttgccgaagcctgaggccggctccgctattagtgacgtgtttgagggccgcgaggtgtgccagccaaaacgaatccggccatttcatcctccaggaagtccatgggccaaccgcccactccccgccagcctcgcaccaacaccaaccggtccagtacatgagccagtcgggtcactgaccccggcaccagtccctcagccactggatccagcgcccgcagtgactcccgaggccagtcacctgttggaggatcccgatgaagagacgagccaggctgtcaaagcccttcgggagatggccgatactgtgattccccagaaggaagaggctgcaatctgtggccaaatggacctttcccatccgcccccaaggggccatctggatgagctgacaaccacacttgagtccatgaccgaggatctgaacctggactcacccctgaccccggaattgaacgagattctggataccttcctgaacgacgagtgcctcttgcatgccatgcatatcagcacaggactgtccatcttcgacacatctctgttttcgggaggtggttcgggtggctctggatcaagccagtacctgcccgacaccgacgaccggcaccggatcgaggaaaagcggaagcggacctacgagacattcaagagcatcatgaagaagtcccccttcagcggccccaccgaccctagacctccacctagaagaatcgccgtgcccagcagatccagcgccagcgtgccaaaacctgccccccagccttaccccttcaccagcagcctgagcaccatcaactacgacgagttccctaccatggtgttccccagcggccagatctctcaggcctctgctctggctccagcccctcctcaggtgctgcctcaggctcctgctcctgcaccagctccagccatggtgtctgcactggctcaggcaccagcacccgtgcctgtgctggctcctggacctccacaggctgtggctccaccagcccctaaacctacacaggccggcgagggcacactgtctgaagctctgctgcagctgcagttcgacgacgaggatctgggagccctgctgggaaacagcaccgatcctgccgtgttcaccgacctggccagcgtggacaacagcgagttccagcagctgctgaaccagggcatccctgtggcccctcacaccaccgagcccatgctgatggaataccccgaggccatcacccggctcgtgacaggcgctcagaggcctcctgatccagctcctgcccctctgggagcaccaggcctgcctaatggactgctgtctggcgacgaggacttcagctctatcgccgatatggatttctcagccttgctgtcaggcggtggtagtggtgggagcggtagtgaggccagcggttccggacgggctgacgcattggacgattttgatctggatatgctgggaagtgacgccctcgatgattttgaccttgacatgcttggttcggatgcccttgatgactttgacctcgacatgctcggcagtgacgcccttgatgatttcgacctggacatgctgattaactctagaagttccggatctccgaaaaagaaacgcaaagttggtggcgcgcctagtggttcagaaacacccggcacatccgagtccgcgacacctgagagtggaggttctggaggttccggctcgagtatgaaactaccgacaaatctagcctatgagcgctctatcgacccatcagatgtctgtttttttgtcgtctggcccgatgatagaaaaacacctttaacctacaattctcgtactctgctcgggcaaatggaagcggcatcattagcctatgatgtctcaggtcaaccaataaaaagtgccaccgctgaggcgttagctcaagggaaccctcatcaagttgatttctgccacgttccatacggtgcgagtcatattgaatgcagtttctccgtctcgttttcttctgaactacgtcaaccatataagtgtaactcaagcaaagttaaacaaacgctagtgcaattagtcgaactctacgaaacgaaaatcggctggactgagctagcaacccgatatttgatgaacatttgcaacggtaaatggctgtggaaaaatacccgtaaagcctattgctggaacattgtacttacaccttggccttggaacggggaaaaggttggatttgaagatattcgtactaactacacctcacggcaagactttaaaaataataaaaattggtctgctatagttgaaatgatcaaaaccgcattttctagtactgatgggctggcgatatttgaagtcagggccaccttgcacttgccaacgaatgctatggtgcggccaagccaagttttcacagaaaaagaaagtggcagtaaaagtaaatctaaaactcaaaacagtcgagtttttcagagtacaactattgatggtgaacgatcgccaatactaggggcctttaaaacgggagcagctattgcaaccattgacgactggtatcctgaagccactgagccactaagggtcggacggtttggggttcatcgcgaagatgtcacttgctaccgtcatccgtctaccggaaaagattttttctcgatattacaacaagcagagcactatattgaagtgttgagcgccaacaaaactcccgctcaagaaactatcaacgacatgcactttttaatggctaacctgattaagggtgggatgttccagcataaaggagactgactatggggcctaagaaaaagcggaaggtgggttccggagtgaaatggtattataagacaatcacctttctgccagagttgtgcaacaacgagtcactggctgcaaagtgtctccgcgttctgcatggatttaactatcagtatgagacacgaaatatcggcgtttcatttccgctttggtgtgatgcaacggttggaaaaaagatttcatttgtcagcaagaacaagatagaactcgacttactacttaaacaacactatttcgtccaaatggaacaacttcaatactttcatatatccaacactgttctcgtcccagaagattgtacatacgtttcctttagacgctgtcaatctatagataagctcacagcagcagggctggcaaggaaaatcagacgcctggagaaacgtgctctatctagaggcgagcaatttgacccatcatcttttgctcaaaaagagcatactgcaatagcgcactaccactcacttggggagtccagcaaacagacgaaccgcaactttcgactcaatatcaggatgctctcggagcaaccccgtgaggggaactcgatttttagtagctatggcttatcaaattcagaaaactcgtttcagcctgtacccttaatctgagtcgacataaggagatatatcatggcgacaagtttacctacgccctcagcaattacgacttcggcgttagagtatgcattccatactcccgctcgcaatctaacgaaatctcgcggaaaaaacattcatcgttatgtcagtgtaaagatgagtaagaggattacggtagaatctactctagagtgtgatgcctgctatcactttgattttgagccaagtattgttcgcttttgcgcacaaccgattcgatttttatattatctcaatggtcagtctcactcctatgttcctgactttctagttcaatttgataccaacgagtttgttctatatgaagtaaagtcagcttatgctaagaacaaacctgattttgatgttgaatgggaggcgaaagtaaaagcagcaactgaactagggctagaattggagcttgttgaagagagtgatattagggatacggttgtattaaataatcttaagcgcatgcatcgttatgcttcgaaagatgagctgaataacgtacataactctctcttaaaaataataaagtacaatggcgcccaatctgcaagatgcttgggagaacagttgggtttaaaaggccgaactgttttaccaattttgtgcgatttgctgtcaaggtgtttactcgatacacgtttggataagcctctatctcttgaatctcgatttgagttggcctcgtacggcggttcacccaagaaaaagcgcaaggtctaactagtaggaggctcgagatgggaccgaagaaaaagagaaaagtgggatccgcgatggctaagaaagggttctcaagtttccatagaaaagcagtctcttcccaagatacgcttgaatcgatagagcttgtctctagcgctaattgtctagaaagtgttacgtatcaagatatatcagcatttcccgaaacaattgcggtagagattaatttccgattaagcattcttcgctttttagcgcgaaagtgcgaaaccattgtggccaaatcaattgaaccacatcgtgtagagctacagcaaaactatagtagaaaaatacccagtgcaataacgatatatcgatggtggcttgcttttcgaaaatcagactacaaccccattagcttagcacctaatatcaaggatagaggtaatagagagacaaaagtgtcaacagttgttgattctattatggaacaggcagttgaaagagttatatctggacgaaaagtcaatgttagctctgcatataaacgtgttcgacgaaaagttcgtcaatacaatctaactcatggaacgaaatacacgtatcctaagtacgaatctgtaagaaagcgagtaaaaaagaaaaccccatttgagttattagccgcagggaaaggggagagagtagctaagagagagtttcgccgaatgggaaaaaagatcctcacgtctagcgtgctagagagggttgaaatagatcacactgtcgttgacctttttgcagtacacgaagagtatcgaatcccattgggccgaccttggcttactcaattggttgattgttacagtaaagctgtaatcggtttttatttaggtttcgagcctcctagctatgtgtcggtttcccttgcacttaagaatgcaatacaacgcaaagatgacttaatctcctcgtatgaatcgatcgagaatgaatggctatgttatggcatcccagacctactcgtaactgataatggtaaagagtttttgtcgaaagcatttgatcaagcatgtgaatcactattgatcaatgtgcatcaaaataaagttgagacgcccgacaacaaacctcatgttgaacgtaactacgggactattaatacttctctgttagacgatttacctgggaaatccttcagccagtaccttcaaagagaagggtacgactctgtgggagaagctacccttacactcaatgagattagagaaatttacttaatttggttggtggatatttatcataaaaaacccaatcagagaggcactaattgtcctaatgttgcgtggaaaaagggttgtcaagaatgggaaccagaggagttctctggttctaaagacgaattagactttaaatttgctattgttgattacaaacaacttactaaagtagggataactgtctacaaagaactgagttatagcaatgaccgtttagctgaatatagagggaagaaaggaaaccataaagttcagttcaagtataaccctgagtgtatggcagttatttgggtgttggatgaggatatgaatgagtactttacagttaatgcgattgactacgaatatgcaagtagagtatcactttggcaacataaatataacatgaaatatcaagcagaactaaattcagcagaatatgatgaggacaaggaaattgatgcagaaataaaaattgaagaaatcgcagatcgttcaattgttaagactaacaaaatcagagctcggaggcgtggcgctaggcatcaagagaatagcgcaagggctaagtcaatcagtaatgcgaacccggcctcgatacaaaaacatgaagatgaaatcgttagtgcagataatgacgattgggatattgattatgtctgagaaatcgtcaaatgggtcctaagaaaaagaggaaagtaggctcttccatgagtgaaacgcgtgaggctcgtatatcaagagctaaaagggcatttgtatccacaccgagcgttaggaaaatcttgagttacatggatagatgtagagatctatcagacctagagtctgagcctacatgcatgatggtctatggtgcttcgggtgtaggtaaaacgaccgtcatcaagaaatacttaaatcaaaacagaagagagtccgaagccgggggcgatataataccggttttgcatattgagttgccagacaatgcgaagccagtagatgcagcaagggaattgctggttgaaatgggtgacccgctagcactttatgaaactgacttagctagattgacgaaaagactgactgaattaatccctgcggtcggcgtgaagctgattattatcgatgagttccaacatttggtggaagaaaggtcaaatcgggttcttacccaagtaggtaattggctaaaaatgatacttaacaaaacgaaatgtccaattgttatatttggtatgccatactcaaaagttgtactgcaagcaaactcgcaacttcacgggcgattttccattcaggttgaactgcgcccctttagctaccagggaggtagaggtgtatttaaaacttttttggaataccttgataaagccctaccttttgaaaaacaggctggcttagccaacgaaagtttgcagaaaaaattgtatgcattctctcagggaaacatgcgttcgttgagaaaccttatttatcaagcatctatcgaagcaattgataatcagcatgagacgataaccgaagaagatttcgtttttgcatcgaagttgacatcgggcgataaacccaactcatggaaaaatccttttgaggagggtgttgaggtaacagaagatatgttacgaccgccaccaaaagatattggttgggaggactatttgagacattcaaccccgagagtgagtaaaccaggtagaaataaaaactttttcgaataacctaggctgctgcgctgctgccaccgctgagcaataactagcataaccccttggggcctctaaacgggtcttgaggggttttttgctgaaacctcaggcatttgagaagcacacggtcacactgcttccggtagtcaataaaccggtaaaccagcaatagacataagcggctatttaacgaccctgccctgaaccgacgaccgggtcatcgtggccggatcttgcggcccctcggcttgaacgaattgttagacattatttgccgactaccttggtgatctcgcctttcacgtagtggacaaattcttccaactgatctgcgcgcgaggccaagcgatcttcttcttgtccaagataagcctgtctagcttcaagtatgacgggctgatactgggccggcaggcgctccattgcccagtcggcagcgacatccttcggcgcgattttgccggttactgcgctgtaccaaatgcgggacaacgtaagcactacatttcgctcatcgccagcccagtcgggcggcgagttccatagcgttaaggtttcatttagcgcctcaaatagatcctgttcaggaaccggatcaaagagttcctccgccgctggacctaccaaggcaacgctatgttctcttgcttttgtcagcaagatagccagatcaatgtcgatcgtggctggctcgaagatacctgcaagaatgtcattgcgctgccattctccaaattgcagttcgcgcttagctggataacgccacggaatgatgtcgtcgtgcacaacaatggtgacttctacagcgcggagaatctcgctctctccaggggaagccgaagtttccaaaaggtcgttgatcaaagctcgccgcgttgtttcatcaagccttacggtcaccgtaaccagcaaatcaatatcactgtgtggcttcaggccgccatccactgcggagccgtacaaatgtacggccagcaacgtcggttcgagatggcgctcgatgacgccaactacctctgatagttgagtcgatacttcggcgatcaccgcttccctcatactcttcctttttcaatattattgaagcatttatcagggttattgtctcatgagcggatacatatttgaatgtatttagaaaaataaacaaatagctagctcactcggtcgctacgctccgggcgtgagactgcggcgggcgctgcggacacatacaaagttacccacagattccgtggataagcaggggactaacatgtgaggcaaaacagcagggccgcgccggtggcgtttttccataggctccgccctcctgccagagttcacataaacagacgcttttccggtgcatctgtgggagccgtgaggctcaaccatgaatctgacagtacgggcgaaacccgacaggacttaaagatccccaccgtttccggcgggtcgctccctcttgcgctctcctgttccgaccctgccgtttaccggatacctgttccgcctttctcccttacgggaagtgtggcgctttctcatagctcacacactggtatctcggctcggtgtaggtcgttcgctccaagctgggctgtaagcaagaactccccgttcagcccgactgctgcgccttatccggtaactgttcacttgagtccaacccggaaaagcacggtaaaacgccactggcagcagccattggtaactgggagttcgcagaggatttgtttagctaaacacgcggttgctcttgaagtgtgcgccaaagtccggctacactggaaggacagatttggttgctgtgctctgcgaaagccagttaccacggttaagcagttccccaactgacttaaccttcgatcaaaccacctccccaggtggttttttcgtttacagggcaaaagattacgcgcagaaaaaaaggatctcaagaagatcctttgatcttttctactgaaccgctctagatttcagtgcaatttatctcttcaaatgtagcacctgaagtcagccccatacgatataagttgtaattctcatgttagtcatgccccgcgcccaccggaaggagctgactgggttgaaggctctcaagggcatcggtcgagatcccggtgcctaatgagtgagctaacttacattaattgcgttgcgctcactgcccgctttccagtcgggaaacctgtcgtgccagctgcattaatgaatcggccaacgcgcggggagaggcggtttgcgtattgggcgccagggtggtttttcttttcaccagtgagacgggcaacagctgattgcccttcaccgcctggccctgagagagttgcagcaagcggtccacgctggtttgccccagcaggcgaaaatcctgtttgatggtggttaacggcgggatataacatgagctgtcttcggtatcgtcgtatcccactaccgagatgtccgcaccaacgcgcagcccggactcggtaatggcgcgcattgcgcccagcgccatctgatcgttggcaaccagcatcgcagtgggaacgatgccctcattcagcatttgcatggtttgttgaaaaccggacatggcactccagtcgccttcccgttccgctatcggctgaatttgattgcgagtgagatatttatgccagccagccagacgcagacgcgccgagacagaacttaatgggcccgctaacagcgcgatttgctggtgacccaatgcgaccagatgctccacgcccagtcgcgtaccgtcttcatgggagaaaataatactgttgatgggtgtctggtcagagacatcaagaaataacgccggaacattagtgcaggcagcttccacagcaatggcatcctggtcatccagcggatagttaatgatcagcccactgacgcgttgcgcgagaagattgtgcaccgccgctttacaggcttcgacgccgcttcgttctaccatcgacaccaccacgctggcacccagttgatcggcgcgagatttaatcgccgcgacaatttgcgacggcgcgtgcagggccagactggaggtggcaacgccaatcagcaacgactgtttgcccgccagttgttgtgccacgcggttgggaatgtaattcagctccgccatcgccgcttccactttttcccgcgttttcgcagaaacgtggctggcctggttcaccacgcgggaaacggtctgataagagacaccggcatactctgcgacatcgtataacgttactggtttcac

SEQ ID NO: 92 - DNA, 5234 bp, synthetic construct
  source 1..5234: mol_type = other DNA
gagcaactcggtcgccgcatacactattctcagaatgacttggttgagtactcaccagtcacagaaaagcatcttacggatggcatgacagtaagagaattatgcagtgctgccataaccatgagtgataacactgcggccaacttacttctgacaacgatcggaggaccgaaggagctaaccgcttttttgcacaacatgggggatcatgtaactcgccttgatcgttgggaaccggagctgaatgaagccataccaaacgacgagcgtgacaccacgatgcctgtagcaatggcaacaacgttgcgcaaactattaactggcgaactacttactctagcttcccggcaacaattaatagactggatggaggcggataaagttgcaggaccacttctgcgctcggcccttccggctggctggtttattgctgataaatctggagccggtgagcgtgggtctcgcggtatcattgcagcactggggccagatggtaagccctcccgtatcgtagttatctacacgacggggagtcaggcaactatggatgaacgaaatagacagatcgctgagataggtgcctcactgattaagcattggtaactgtcagaccaagtttactcatatatactttagattgatttaaaacttcatttttaatttaaaaggatctaggtgaagatcctttttgataatctcatgaccaaaatcccttaacgtgagttttcgttccactgagcgtcagaccccgtagaaaagatcaaaggatcttcttgagatcctttttttctgcgcgtaatctgctgcttgcaaacaaaaaaaccaccgctaccagcggtggtttgtttgccggatcaagagctaccaactctttttccgaaggtaactggcttcagcagagcgcagataccaaatactgttcttctagtgtagccgtagttaggccaccacttcaagaactctgtagcaccgcctacatacctcgctctgctaatcctgttaccagtggctgctgccagtggcgataagtcgtgtcttaccgggttggactcaagacgatagttaccggataaggcgcagcggtcgggctgaacggggggttcgtgcacacagcccagcttggagcgaacgacctacaccgaactgagatacctacagcgtgagctatgagaaagcgccacgcttcccgaagggagaaaggcggacaggtatccggtaagcggcagggtcggaacaggagagcgcacgagggagcttccagggggaaacgcctggtatctttatagtcctgtcgggtttcgccacctctgacttgagcgtcgatttttgtgatgctcgtcaggggggcggagcctatggaaaaacgccagcaacgcggcctttttacggttcctggccttttgctggccttttgctcacatgttctttcctgcgttatcccctgattctgtggataaccgtattaccgcctttgagtgagctgataccgctcgccgcagccgaacgaccgagcgcagcgagtcagtgagcgaggacgagggcctatttcccatgattccttcatatttgcatatacgatacaaggctgttagagagataattggaattaatttgactgtaaacacaaagatattagtacaaaatacgtgacgtagaaagtaataatttcttgggtagtttgcagttttaaaattatgttttaaaatggactatcatatgcttaccgtaacttgaaagtatttcgatttcttggctttatatatcttgtggaaaggacgaaacaccgtaatacgactcactatagggtctagaattcctgtgacctgccgtataggcagctgaagatacagtggggccactagggacaggattggtgacataattctgccgaaaaggcagtgagtagtgtagcggccgctttttttttggaagagcgcccaatacgcaaaccgcctctccccgcgcgttggccgattcattaatgcagctggcacgacaggtttcccgactggaaagcgggcagtgagcgcaacgcaattaatgtgagttagctcactcattaggcaccccaggctttacactttatgcttccggctcgtatgttgtgtggaattgtgagcggataacaatttcacacaggaaacagctatgaccatgattacgccaacgtttaataaataataaataataaaataaaaaataaaaaataaataagatacattgatgagtttggacaaaccacaactagaatgcagtgaaaaaaatgctttatttgtgaaatttgtgatgctattgctttatttgtaaccattataagctgcaataaacaagttaagctttgtcgctgcaaccatagtttgacataatgcaaccataccttgacataattaaagtcatactctgacataaagcccgatcagcattagcaagacggctcacgagatggagccagagaggatcctggatcgtgtcttcgactgacctcttctcttcctcccacagggcctcgagagatctggcagcggagagggcagaggaagtctgctaacatgcggtgacgtcgaggagaatcctggccctaggctcgagatgaccgagtacaagcccacggtgcgcctcgccacccgcgacgacgtccccagggccgtacgcaccctcgccgccgcgttcgccgactaccccgccacgcgccacaccgtcgatccggaccgccacatcgagcgggtcaccgagctgcaagaactcttcctcacgcgcgtcgggctcgacatcggcaaggtgtgggtcgcggacgacggcgccgcggtggcggtctggaccacgccggagagcgtcgaagcgggggcggtgttcgccgagatcggcccgcgcatggccgagttgagcggttcccggctggccgcgcagcaacagatggaaggcctcctggcgccgcaccggcccaaggagcccgcgtggttcctggccaccgtcggagtctcgcccgaccaccagggcaagggtctgggcagcgccgtcgtgctccccggagtggaggcggccgagcgcgccggggtgcccgccttcctggagacctccgcgccccgcaacctccccttctacgagcggctcggcttcaccgtcaccgccgacgtcgaggtgcccgaaggaccgcgcacctggtgcatgacccgcaagcccggtgccggcagtggagagggcagaggaagtctgctaacatgcggtgacgtcgaggagaatcctggcccagtgagcaagggcgaggagctgttcaccggggtggtgcccatcctggtcgagctggacggcgacgtaaacggccacaagttcagcgtgtccggcgagggcgagggcgatgccacctacggcaagctgaccctgaagttcatctgcaccaccggcaagctgcccgtgccctggcccaccctcgtgaccaccctgacctacggcgtgcagtgcttcagccgctaccccgaccacatgaagcagcacgacttcttcaagtccgccatgcccgaaggctacgtccaggagcgcaccatcttcttcaaggacgacggcaactacaagacccgcgccgaggtgaagttcgagggcgacaccctggtgaaccgcatcgagctgaagggcatcgacttcaaggaggacggcaacatcctggggcacaagctggagtacaactacaacagccacaacgtctatatcatggccgacaagcagaagaacggcatcaaggtgaacttcaagatccgccacaacatcgaggacggcagcgtgcagctcgccgaccactaccagcagaacacccccatcggcgacggccccgtgctgctgcccgacaaccactacctgagcacccagtgcgccctgagcaaagaccccaacgagaagcgcgatcacatggtcctgctggagttcgtgaccgccgccgggatcactctcggcatggacgagctgtacaaggaattctaactagagctcgctgatcagcctcgactgtgccttctagttgccagccatctgttgtttgcccctcccccgtgccttccttgaccctggaaggtgccactcccactgtcctttcctaataaaatgaggaaattgcatcgcattgtctgagtaggtgtcattctattctggggggtggggtggggcaggacagcaagggggaggattgggaagagaatagcaggcatgctggggatcgaagacacagtcggctggtttttttgtttttagcgttataacttttatttcactatgtcactgtatggttgcattttatgtcagtgaatggttgcaggttttttgtaagttattgatatgcctatccagtgtatgtcacgctttgcttgcagcgacaggtaccgagctcgaattcactggccgtcgttttacaacgtcgtgactgggaaaaccctggcgttacccaacttaatcgccttgcagcacatccccctttcgccagctggcgtaatagcgaagaggcccgcaccgatcgcccttcccaacagttgcgcagcctgaatggcgaatggcgcctgatgcggtattttctccttacgcatctgtgcggtatttcacaccgcatatggtgcactctcagtacaatctgctctgatgccgcatagttaagccagccccgacacccgccaacacccgctgacgcgccctgacgggcttgtctgctcccggcatccgcttacagacaagctgtgaccgtctccgggagctgcatgtgtcagaggttttcaccgtcatcaccgaaacgcgcgagacgaaagggcctcgtgatacgcctatttttataggttaatgtcatgataataatggtttcttagacgtcaggtggcacttttcggggaaatgtgcgcggaacccctatttgtttatttttctaaatacattcaaatatgtatccgctcatgagacaataaccctgataaatgcttcaataatattgaaaaaggaagagtatgagtattcaacatttccgtgtcgcccttattcccttttttgcggcattttgccttcctgtttttgctcacccagaaacgctggtgaaagtaaaagatgctgaagatcagttgggtgcacgagtgggttacatcgaactggatctcaacagcggtaagatccttgagagttttcgccccgaagaacgttttccaatgatgagcacttttaaagttctgctatgtggcgcggtattatcccgtattgacgccgggcaa

SEQ ID NO: 93 - DNA, 7910 bp, synthetic construct
  source 1..7910: mol_type = other DNA
gacggatcgggagatctcccgatcccctatggtgcactctcagtacaatctgctctgatgccgcatagttaagccagtatctgctccctgcttgtgtgttggaggtcgctgagtagtgcgcgagcaaaatttaagctacaacaaggcaaggcttgaccgacaattgcatgaagaatctgcttagggttaggcgttttgcgctgcttcgcgatgtacgggccagatatacgcgttgacattgattattgactagttattaatagtaatcaattacggggtcattagttcatagcccatatatggagttccgcgttacataacttacggtaaatggcccgcctggctgaccgcccaacgacccccgcccattgacgtcaataatgacgtatgttcccatagtaacgccaatagggactttccattgacgtcaatgggtggagtatttacggtaaactgcccacttggcagtacatcaagtgtatcatatgccaagtacgccccctattgacgtcaatgacggtaaatggcccgcctggcattatgcccagtacatgaccttatgggactttcctacttggcagtacatctacgtattagtcatcgctattaccatggtgatgcggttttggcagtacatcaatgggcgtggatagcggtttgactcacggggatttccaagtctccaccccattgacgtcaatgggagtttgttttggcaccaaaatcaacgggactttccaaaatgtcgtaacaactccgccccattgacgcaaatgggcggtaggcgtgtacggtgggaggtctatataagcagagctctctggctaactagagaacccactgcttactggcttatcgaaattaatacgactcactatagggagacccaagctggctagcgtttaaacttaagcttggtaccgccaccatgtacatcagaaacctgagaaagccttctccaaacaagaacgtgttcaagttcgcctccaccaaggtgtccagcgtggtgatgtgcgagagcagcctggagttcgacgcctgcttccaccacgagtacaacgaccttatcgagtctttcggcagccaacctgagggcttcaaatacgagttcatgggcaagtccctgccttatacacctgatgccctgatcagctacaccgataagacacagaaataccacgagtacaagccctactctaagatcgccagccctctgttccgggctgaatttgccgccaagcgggccgcttctctgaaactgggaatcgacctggtcctggtgaccgacagacagatcagagtgaaccctatcctgaacaatctgaagctgctgcatagatacagcggcgtgtacggcatcagcggcatccagaaggaactgctgagctttatccacaaaagcggcgttatcaagctgaatgacatcagcagccaggtgggaatccccatcggcgaaacccggagcttcctgtttggcctcatgcacaagggcctggtgaaggccgacctgggctgtgatgacctgaccaacaaccccaccctgtgggccacacctggcagcggctccggaaaacggacagccgacggaagcgagttcgagtcaccaaagaagaagcggaaagtcggatccggctctggaggcatgaccgatttctttaacgagttcgacgagagcctggtgcccctgaagcctcagaccccaacacagtacgtgaagctggacgatgccaacctgatccagcgggatctggacaccttctccgataccttcaagaatcaggccctgcagagatataagctgatctccaccatcgacaagaagctgtctaggggctggacacagcgcaacctggaccccatcctggacgagctgttcaagggcggcgacgtggtgaggcctaattggcgcacagtggcccggtggagaaagaagtacatcgagtctaacggcgatatcgccagcctggccgacaagaatcacaagatgggcaacaggaccaatcgcatcaagggcgacgataagttctttgataaggccctggagcggttcctggacgccaagagacctacaatcgccaccgcctatcagtactataaggatctgatcgtgatcgagaacgagtccatcgtggagggcaagatcccaatcatctcttacaacgcctttaataagaggatcaaggccatcccaccttatgcagtggcagtggcacgccacggcaagttcaaggccgaccagtggtttgcatactgcgcagcacacgtgccaccaaccagaatcctggagcgggtggagatcgatcacacacccctggacctgatcctgctggacgatgagctgctgatcccaatcggcaggccctatctgacactgctgatcgacgtgttcagcggctgcgtgctgggctttcacctgagctacaagagcccttcctacgtgagcgccgcaaaggcaatcacccacgccatcaagccaaagtccctggatgccctgaacatcgagctgcagaatgactggccctgcttcggcaagtttgagaacctggtggtggacaatggcgccgagttctggtctaagaacctggagcacgcctgtcagagcgccggcatcaacatccagtacaatcctgtgaggaagccctggctgaagccctttatcgagcggttcttcggcgtgatgaacgagtacttcctgcccgagctgcctggcaagaccttttctaatatcctggagaaggaggagtataagcccgagaaggacgccatcatgcggttcagcacatttgtggaggagttccacagatggatcgccgacgtgtaccaccaggactctaatagccgggagaccagaatccctatcaagaggtggcagcagggcttcgatgcctatcctccactgaccatgaacgaggaggaggagacaaggttttccatgctgatgcgcatctccgactctaggaccctgacacgcaatggctttaagtaccaggagctgatgtatgattctaccgccctggccgactaccgcaagcactatccacagacaaaggagaccgtgaagaagctgatcaaggtggaccccgacgatatcagcaaaatctacgtgtacctggaggagctggagtcctacctggaggtgccttgcacagatccaaccggctacacagacggcctgagcatctatgagcacaagaccatcaagaagatcaaccgggaagtgatcagagagagcaaggactccctgggcctggccaaggcaaggatggccatccacgagagagtgaagcaggagcaggaggtgttcatcgagtccaagaccaaggccaagatcacagccgtgaagaagcaggcccagatcgccgatgtgagcaataccggcacatccaccatcaaggtgtctgaggagagcgccgcaccagtgcagaagcacatctccaacgacaattctgacgattgggacgatgacctgtgatctagagggcccgtttaaacccgctgatcagcctcgactgtgccttctagttgccagccatctgttgtttgcccctcccccgtgccttccttgaccctggaaggtgccactcccactgtcctttcctaataaaatgaggaaattgcatcgcattgtctgagtaggtgtcattctattctggggggtggggtggggcaggacagcaagggggaggattgggaagacaatagcaggcatgctggggatgcggtgggctctatggcttctgaggcggaaagaaccagctggggctctagggggtatccccacgcgccctgtagcggcgcattaagcgcggcgggtgtggtggttacgcgcagcgtgaccgctacacttgccagcgccctagcgcccgctcctttcgctttcttcccttcctttctcgccacgttcgccggctttccccgtcaagctctaaatcgggggctccctttagggttccgatttagtgctttacggcacctcgaccccaaaaaacttgattagggtgatggttcacgtagtgggccatcgccctgatagacggtttttcgccctttgacgttggagtccacgttctttaatagtggactcttgttccaaactggaacaacactcaaccctatctcggtctattcttttgatttataagggattttgccgatttcggcctattggttaaaaaatgagctgatttaacaaaaatttaacgcgaattaattctgtggaatgtgtgtcagttagggtgtggaaagtccccaggctccccagcaggcagaagtatgcaaagcatgcatctcaattagtcagcaaccaggtgtggaaagtccccaggctccccagcaggcagaagtatgcaaagcatgcatctcaattagtcagcaaccatagtcccgcccctaactccgcccatcccgcccctaactccgcccagttccgcccattctccgccccatggctgactaattttttttatttatgcagaggccgaggccgcctctgcctctgagctattccagaagtagtgaggaggcttttttggaggcctaggcttttgcaaaaagctcccgggagcttgtatatccattttcggatctgatcaagagacaggatgaggatcgtttcgcatgattgaacaagatggattgcacgcaggttctccggccgcttgggtggagaggctattcggctatgactgggcacaacagacaatcggctgctctgatgccgccgtgttccggctgtcagcgcaggggcgcccggttctttttgtcaagaccgacctgtccggtgccctgaatgaactgcaggacgaggcagcgcggctatcgtggctggccacgacgggcgttccttgcgcagctgtgctcgacgttgtcactgaagcgggaagggactggctgctattgggcgaagtgccggggcaggatctcctgtcatctcaccttgctcctgccgagaaagtatccatcatggctgatgcaatgcggcggctgcatacgcttgatccggctacctgcccattcgaccaccaagcgaaacatcgcatcgagcgagcacgtactcggatggaagccggtcttgtcgatcaggatgatctggacgaagagcatcaggggctcgcgccagccgaactgttcgccaggctcaaggcgcgcatgcccgacggcgaggatctcgtcgtgacccatggcgatgcctgcttgccgaatatcatggtggaaaatggccgcttttctggattcatcgactgtggccggctgggtgtggcggaccgctatcaggacatagcgttggctacccgtgatattgctgaagagcttggcggcgaatgggctgaccgcttcctcgtgctttacggtatcgccgctcccgattcgcagcgcatcgccttctatcgccttcttgacgagttcttctgagcgggactctggggttcgaaatgaccgaccaagcgacgcccaacctgccatcacgagatttcgattccaccgccgccttctatgaaaggttgggcttcggaatcgttttccgggacgccggctggatgatcctccagcgcggggatctcatgctggagttcttcgcccaccccaacttgtttattgcagcttataatggttacaaataaagcaatagcatcacaaatttcacaaataaagcatttttttcactgcattctagttgtggtttgtccaaactcatcaatgtatcttatcatgtctgtataccgtcgacctctagctagagcttggcgtaatcatggtcatagctgtttcctgtgtgaaattgttatccgctcacaattccacacaacatacgagccggaagcataaagtgtaaagcctggggtgcctaatgagtgagctaactcacattaattgcgttgcgctcactgcccgctttccagtcgggaaacctgtcgtgccagctgcattaatgaatcggccaacgcgcggggagaggcggtttgcgtattgggcgctcttccgcttcctcgctcactgactcgctgcgctcggtcgttcggctgcggcgagcggtatcagctcactcaaaggcggtaatacggttatccacagaatcaggggataacgcaggaaagaacatgtgagcaaaaggccagcaaaaggccaggaaccgtaaaaaggccgcgttgctggcgtttttccataggctccgcccccctgacgagcatcacaaaaatcgacgctcaagtcagaggtggcgaaacccgacaggactataaagataccaggcgtttccccctggaagctccctcgtgcgctctcctgttccgaccctgccgcttaccggatacctgtccgcctttctcccttcgggaagcgtggcgctttctcatagctcacgctgtaggtatctcagttcggtgtaggtcgttcgctccaagctgggctgtgtgcacgaaccccccgttcagcccgaccgctgcgccttatccggtaactatcgtcttgagtccaacccggtaagacacgacttatcgccactggcagcagccactggtaacaggattagcagagcgaggtatgtaggcggtgctacagagttcttgaagtggtggcctaactacggctacactagaagaacagtatttggtatctgcgctctgctgaagccagttaccttcggaaaaagagttggtagctcttgatccggcaaacaaaccaccgctggtagcggtttttttgtttgcaagcagcagattacgcgcagaaaaaaaggatctcaagaagatcctttgatcttttctacggggtctgacgctcagtggaacgaaaactcacgttaagggattttggtcatgagattatcaaaaaggatcttcacctagatccttttaaattaaaaatgaagttttaaatcaatctaaagtatatatgagtaaacttggtctgacagttaccaatgcttaatcagtgaggcacctatctcagcgatctgtctatttcgttcatccatagttgcctgactccccgtcgtgtagataactacgatacgggagggcttaccatctggccccagtgctgcaatgataccgcgagacccacgctcaccggctccagatttatcagcaataaaccagccagccggaagggccgagcgcagaagtggtcctgcaactttatccgcctccatccagtctattaattgttgccgggaagctagagtaagtagttcgccagttaatagtttgcgcaacgttgttgccattgctacaggcatcgtggtgtcacgctcgtcgtttggtatggcttcattcagctccggttcccaacgatcaaggcgagttacatgatcccccatgttgtgcaaaaaagcggttagctccttcggtcctccgatcgttgtcagaagtaagttggccgcagtgttatcactcatggttatggcagcactgcataattctcttactgtcatgccatccgtaagatgcttttctgtgactggtgagtactcaaccaagtcattctgagaatagtgtatgcggcgaccgagttgctcttgcccggcgtcaatacgggataataccgcgccacatagcagaactttaaaagtgctcatcattggaaaacgttcttcggggcgaaaactctcaaggatcttaccgctgttgagatccagttcgatgtaacccactcgtgcacccaactgatcttcagcatcttttactttcaccagcgtttctgggtgagcaaaaacaggaaggcaaaatgccgcaaaaaagggaataagggcgacacggaaatgttgaatactcatactcttcctttttcaatattattgaagcatttatcagggttattgtctcatgagcggatacatatttgaatgtatttagaaaaataaacaaataggggttccgcgcacatttccccgaaaagtgccacctgacgtc

SEQ ID NO: 94 - DNA, 7898 bp, synthetic construct
  source 1..7898: mol_type = other DNA
gacggatcgggagatctcccgatcccctatggtgcactctcagtacaatctgctctgatgccgcatagttaagccagtatctgctccctgcttgtgtgttggaggtcgctgagtagtgcgcgagcaaaatttaagctacaacaaggcaaggcttgaccgacaattgcatgaagaatctgcttagggttaggcgttttgcgctgcttcgcgatgtacgggccagatatacgcgttgacattgattattgactagttattaatagtaatcaattacggggtcattagttcatagcccatatatggagttccgcgttacataacttacggtaaatggcccgcctggctgaccgcccaacgacccccgcccattgacgtcaataatgacgtatgttcccatagtaacgccaatagggactttccattgacgtcaatgggtggagtatttacggtaaactgcccacttggcagtacatcaagtgtatcatatgccaagtacgccccctattgacgtcaatgacggtaaatggcccgcctggcattatgcccagtacatgaccttatgggactttcctacttggcagtacatctacgtattagtcatcgctattaccatggtgatgcggttttggcagtacatcaatgggcgtggatagcggtttgactcacggggatttccaagtctccaccccattgacgtcaatgggagtttgttttggcaccaaaatcaacgggactttccaaaatgtcgtaacaactccgccccattgacgcaaatgggcggtaggcgtgtacggtgggaggtctatataagcagagctctctggctaactagagaacccactgcttactggcttatcgaaattaatacgactcactatagggagacccaagctggctagcgtttaaacttaagcttggtaccgccaccatgtacatcagaaacctgagaaagccttctccaaacaagaacgtgttcaagttcgcctccaccaaggtgtccagcgtggtgatgtgcgagagcagcctggagttcgacgcctgcttccaccacgagtacaacgaccttatcgagtctttcggcagccaacctgagggcttcaaatacgagttcatgggcaagtccctgccttatacacctgatgccctgatcagctacaccgataagacacagaaataccacgagtacaagccctactctaagatcgccagccctctgttccgggctgaatttgccgccaagcgggccgcttctctgaaactgggaatcgacctggtcctggtgaccgacagacagatcagagtgaaccctatcctgaacaatctgaagctgctgcatagatacagcggcgtgtacggcatcagcggcatccagaaggaactgctgagctttatccacaaaagcggcgttatcaagctgaatgacatcagcagccaggtgggaatccccatcggcgaaacccggagcttcctgtttggcctcatgcacaagggcctggtgaaggccgacctgggctgtgatgacctgaccaacaaccccaccctgtgggccacacctggcagcggctccggaaaacggacagccgacggaagcgagttcgagtcaccaaagaagaagcggaaagtcggatccggctctggaggcatgaccgatttctttaacgagttcgacgagagcctggtgcccctgaagcctcagaccccaacacagtacgtgaagctggacgatgccaacctgatccagcgggatctggacaccttctccgataccttcaagaatcaggccctgcagagatataagctgatctccaccatcgacaagaagctgtctaggggctggacacagcgcaacctggaccccatcctggacgagctgttcaagggcggcgacgtggtgaggcctaattggcgcacagtggcccggtggagaaagaagtacatcgagtctaacggcgatatcgccagcctggccgacaagaatcacaagatgggcaacaggaccaatcgcatcaagggcgacgataagttctttgataaggccctggagcggttcctggacgccaagagacctacaatcgccaccgcctatcagtactataaggatctgatcgtgatcgagaacgagtccatcgtggagggcaagatcccaatcatctcttacaacgcctttaataagaggatcaaggccatcccaccttatgcagtggcagtggcacgccacggcaagttcaaggccgaccagtggtttgcatactgcgcagcacacgtgccaccaaccagaatcctggagcgggtggagatcgatcacacacccctggacctgatcctgctggacgatgagctgctgatcccaatcggcaggccctatctgacactgctgatcgacgtgttcagcggctgcgtgctgggctttcacctgagctacaagagcccttcctacgtgagcgccgcaaaggcaatcacccacgccatcaagccaaagtccctggatgccctgaacatcgagctgcagaatgactggccctgcttcggcaagtttgagaacctggtggtggacaatggcgccgagttctggtctaagaacctggagcacgcctgtcagagcgccggcatcaacatccagtacaatcctgtgaggaagccctggctgaagccctttatcgagcggttcttcggcgtgatgaacgagtacttcctgcccgagctgcctggcaagaccttttctaatatcctggagaaggaggagtataagcccgagaaggacgccatcatgcggttcagcacatttgtggaggagttccacagatggatcgccgacgtgtaccaccaggactctaatagccgggagaccagaatccctatcaagaggtggcagcagggcttcgatgcctatcctccactgaccatgaacgaggaggaggagacaaggttttccatgctgatgcgcatctccgactctaggaccctgacacgcaatggctttaagtaccaggagctgatgtatgattctaccgccctggccgactaccgcaagcactatccacagacaaaggagaccgtgaagaagctgatcaaggtggaccccgacgatatcagcaaaatctacgtgtacctggaggagctggagtcctacctggaggtgccttgcacagatccaaccggctacacagacggcctgagcatctatgagcacaagaccatcaagaagatcaaccgggaagtgatcagagagagcaaggactccctgggcctggccaaggcaaggatggccatccacgagagagtgaagcaggagcaggaggtgttcatcgagtccaagaccaaggccaagatcacagccgtgaagaagcaggcccagatcgccgatgtgagcaataccggcacatccaccatcaaggtgtctgaggagagcgccgcaccagtgcagaagcacatctccaacgacaattctgacgattggtgatctagagggcccgtttaaacccgctgatcagcctcgactgtgccttctagttgccagccatctgttgtttgcccctcccccgtgccttccttgaccctggaaggtgccactcccactgtcctttcctaataaaatgaggaaattgcatcgcattgtctgagtaggtgtcattctattctggggggtggggtggggcaggacagcaagggggaggattgggaagacaatagcaggcatgctggggatgcggtgggctctatggcttctgaggcggaaagaaccagctggggctctagggggtatccccacgcgccctgtagcggcgcattaagcgcggcgggtgtggtggttacgcgcagcgtgaccgctacacttgccagcgccctagcgcccgctcctttcgctttcttcccttcctttctcgccacgttcgccggctttccccgtcaagctctaaatcgggggctccctttagggttccgatttagtgctttacggcacctcgaccccaaaaaacttgattagggtgatggttcacgtagtgggccatcgccctgatagacggtttttcgccctttgacgttggagtccacgttctttaatagtggactcttgttccaaactggaacaacactcaaccctatctcggtctattcttttgatttataagggattttgccgatttcggcctattggttaaaaaatgagctgatttaacaaaaatttaacgcgaattaattctgtggaatgtgtgtcagttagggtgtggaaagtccccaggctccccagcaggcagaagtatgcaaagcatgcatctcaattagtcagcaaccaggtgtggaaagtccccaggctccccagcaggcagaagtatgcaaagcatgcatctcaattagtcagcaaccatagtcccgcccctaactccgcccatcccgcccctaactccgcccagttccgcccattctccgccccatggctgactaattttttttatttatgcagaggccgaggccgcctctgcctctgagctattccagaagtagtgaggaggcttttttggaggcctaggcttttgcaaaaagctcccgggagcttgtatatccattttcggatctgatcaagagacaggatgaggatcgtttcgcatgattgaacaagatggattgcacgcaggttctccggccgcttgggtggagaggctattcggctatgactgggcacaacagacaatcggctgctctgatgccgccgtgttccggctgtcagcgcaggggcgcccggttctttttgtcaagaccgacctgtccggtgccctgaatgaactgcaggacgaggcagcgcggctatcgtggctggccacgacgggcgttccttgcgcagctgtgctcgacgttgtcactgaagcgggaagggactggctgctattgggcgaagtgccggggcaggatctcctgtcatctcaccttgctcctgccgagaaagtatccatcatggctgatgcaatgcggcggctgcatacgcttgatccggctacctgcccattcgaccaccaagcgaaacatcgcatcgagcgagcacgtactcggatggaagccggtcttgtcgatcaggatgatctggacgaagagcatcaggggctcgcgccagccgaactgttcgccaggctcaaggcgcgcatgcccgacggcgaggatctcgtcgtgacccatggcgatgcctgcttgccgaatatcatggtggaaaatggccgcttttctggattcatcgactgtggccggctgggtgtggcggaccgctatcaggacatagcgttggctacccgtgatattgctgaagagcttggcggcgaatgggctgaccgcttcctcgtgctttacggtatcgccgctcccgattcgcagcgcatcgccttctatcgccttcttgacgagttcttctgagcgggactctggggttcgaaatgaccgaccaagcgacgcccaacctgccatcacgagatttcgattccaccgccgccttctatgaaaggttgggcttcggaatcgttttccgggacgccggctggatgatcctccagcgcggggatctcatgctggagttcttcgcccaccccaacttgtttattgcagcttataatggttacaaataaagcaatagcatcacaaatttcacaaataaagcatttttttcactgcattctagttgtggtttgtccaaactcatcaatgtatcttatcatgtctgtataccgtcgacctctagctagagcttggcgtaatcatggtcatagctgtttcctgtgtgaaattgttatccgctcacaattccacacaacatacgagccggaagcataaagtgtaaagcctggggtgcctaatgagtgagctaactcacattaattgcgttgcgctcactgcccgctttccagtcgggaaacctgtcgtgccagctgcattaatgaatcggccaacgcgcggggagaggcggtttgcgtattgggcgctcttccgcttcctcgctcactgactcgctgcgctcggtcgttcggctgcggcgagcggtatcagctcactcaaaggcggtaatacggttatccacagaatcaggggataacgcaggaaagaacatgtgagcaaaaggccagcaaaaggccaggaaccgtaaaaaggccgcgttgctggcgtttttccataggctccgcccccctgacgagcatcacaaaaatcgacgctcaagtcagaggtggcgaaacccgacaggactataaagataccaggcgtttccccctggaagctccctcgtgcgctctcctgttccgaccctgccgcttaccggatacctgtccgcctttctcccttcgggaagcgtggcgctttctcatagctcacgctgtaggtatctcagttcggtgtaggtcgttcgctccaagctgggctgtgtgcacgaaccccccgttcagcccgaccgctgcgccttatccggtaactatcgtcttgagtccaacccggtaagacacgacttatcgccactggcagcagccactggtaacaggattagcagagcgaggtatgtaggcggtgctacagagttcttgaagtggtggcctaactacggctacactagaagaacagtatttggtatctgcgctctgctgaagccagttaccttcggaaaaagagttggtagctcttgatccggcaaacaaaccaccgctggtagcggtttttttgtttgcaagcagcagattacgcgcagaaaaaaaggatctcaagaagatcctttgatcttttctacggggtctgacgctcagtggaacgaaaactcacgttaagggattttggtcatgagattatcaaaaaggatcttcacctagatccttttaaattaaaaatgaagttttaaatcaatctaaagtatatatgagtaaacttggtctgacagttaccaatgcttaatcagtgaggcacctatctcagcgatctgtctatttcgttcatccatagttgcctgactccccgtcgtgtagataactacgatacgggagggcttaccatctggccccagtgctgcaatgataccgcgagacccacgctcaccggctccagatttatcagcaataaaccagccagccggaagggccgagcgcagaagtggtcctgcaactttatccgcctccatccagtctattaattgttgccgggaagctagagtaagtagttcgccagttaatagtttgcgcaacgttgttgccattgctacaggcatcgtggtgtcacgctcgtcgtttggtatggcttcattcagctccggttcccaacgatcaaggcgagttacatgatcccccatgttgtgcaaaaaagcggttagctccttcggtcctccgatcgttgtcagaagtaagttggccgcagtgttatcactcatggttatggcagcactgcataattctcttactgtcatgccatccgtaagatgcttttctgtgactggtgagtactcaaccaagtcattctgagaatagtgtatgcggcgaccgagttgctcttgcccggcgtcaatacgggataataccgcgccacatagcagaactttaaaagtgctcatcattggaaaacgttcttcggggcgaaaactctcaaggatcttaccgctgttgagatccagttcgatgtaacccactcgtgcacccaactgatcttcagcatcttttactttcaccagcgtttctgggtgagcaaaaacaggaaggcaaaatgccgcaaaaaagggaataagggcgacacggaaatgttgaatactcatactcttcctttttcaatattattgaagcatttatcagggttattgtctcatgagcggatacatatttgaatgtatttagaaaaataaacaaataggggttccgcgcacatttccccgaaaagtgccacctgacgtc

SEQ ID NO: 95 - DNA, 7889 bp, synthetic construct
  source 1..7889: mol_type = other DNA
gacggatcgggagatctcccgatcccctatggtgcactctcagtacaatctgctctgatgccgcatagttaagccagtatctgctccctgcttgtgtgttggaggtcgctgagtagtgcgcgagcaaaatttaagctacaacaaggcaaggcttgaccgacaattgcatgaagaatctgcttagggttaggcgttttgcgctgcttcgcgatgtacgggccagatatacgcgttgacattgattattgactagttattaatagtaatcaattacggggtcattagttcatagcccatatatggagttccgcgttacataacttacggtaaatggcccgcctggctgaccgcccaacgacccccgcccattgacgtcaataatgacgtatgttcccatagtaacgccaatagggactttccattgacgtcaatgggtggagtatttacggtaaactgcccacttggcagtacatcaagtgtatcatatgccaagtacgccccctattgacgtcaatgacggtaaatggcccgcctggcattatgcccagtacatgaccttatgggactttcctacttggcagtacatctacgtattagtcatcgctattaccatggtgatgcggttttggcagtacatcaatgggcgtggatagcggtttgactcacggggatttccaagtctccaccccattgacgtcaatgggagtttgttttggcaccaaaatcaacgggactttccaaaatgtcgtaacaactccgccccattgacgcaaatgggcggtaggcgtgtacggtgggaggtctatataagcagagctctctggctaactagagaacccactgcttactggcttatcgaaattaatacgactcactatagggagacccaagctggctagcgtttaaacttaagcttggtaccgccaccatgtacatcagaaacctgagaaagccttctccaaacaagaacgtgttcaagttcgcctccaccaaggtgtccagcgtggtgatgtgcgagagcagcctggagttcgacgcctgcttccaccacgagtacaacgaccttatcgagtctttcggcagccaacctgagggcttcaaatacgagttcatgggcaagtccctgccttatacacctgatgccctgatcagctacaccgataagacacagaaataccacgagtacaagccctactctaagatcgccagccctctgttccgggctgaatttgccgccaagcgggccgcttctctgaaactgggaatcgacctggtcctggtgaccgacagacagatcagagtgaaccctatcctgaacaatctgaagctgctgcatagatacagcggcgtgtacggcatcagcggcatccagaaggaactgctgagctttatccacaaaagcggcgttatcaagctgaatgacatcagcagccaggtgggaatccccatcggcgaaacccggagcttcctgtttggcctcatgcacaagggcctggtgaaggccgacctgggctgtgatgacctgaccaacaaccccaccctgtgggccacacctggcagcggctccggaaaacggacagccgacggaagcgagttcgagtcaccaaagaagaagcggaaagtcggatccggctctggaggcatgaccgatttctttaacgagttcgacgagagcctggtgcccctgaagcctcagaccccaacacagtacgtgaagctggacgatgccaacctgatccagcgggatctggacaccttctccgataccttcaagaatcaggccctgcagagatataagctgatctccaccatcgacaagaagctgtctaggggctggacacagcgcaacctggaccccatcctggacgagctgttcaagggcggcgacgtggtgaggcctaattggcgcacagtggcccggtggagaaagaagtacatcgagtctaacggcgatatcgccagcctggccgacaagaatcacaagatgggcaacaggaccaatcgcatcaagggcgacgataagttctttgataaggccctggagcggttcctggacgccaagagacctacaatcgccaccgcctatcagtactataaggatctgatcgtgatcgagaacgagtccatcgtggagggcaagatcccaatcatctcttacaacgcctttaataagaggatcaaggccatcccaccttatgcagtggcagtggcacgccacggcaagttcaaggccgaccagtggtttgcatactgcgcagcacacgtgccaccaaccagaatcctggagcgggtggagatcgatcacacacccctggacctgatcctgctggacgatgagctgctgatcccaatcggcaggccctatctgacactgctgatcgacgtgttcagcggctgcgtgctgggctttcacctgagctacaagagcccttcctacgtgagcgccgcaaaggcaatcacccacgccatcaagccaaagtccctggatgccctgaacatcgagctgcagaatgactggccctgcttcggcaagtttgagaacctggtggtggacaatggcgccgagttctggtctaagaacctggagcacgcctgtcagagcgccggcatcaacatccagtacaatcctgtgaggaagccctggctgaagccctttatcgagcggttcttcggcgtgatgaacgagtacttcctgcccgagctgcctggcaagaccttttctaatatcctggagaaggaggagtataagcccgagaaggacgccatcatgcggttcagcacatttgtggaggagttccacagatggatcgccgacgtgtaccaccaggactctaatagccgggagaccagaatccctatcaagaggtggcagcagggcttcgatgcctatcctccactgaccatgaacgaggaggaggagacaaggttttccatgctgatgcgcatctccgactctaggaccctgacacgcaatggctttaagtaccaggagctgatgtatgattctaccgccctggccgactaccgcaagcactatccacagacaaaggagaccgtgaagaagctgatcaaggtggaccccgacgatatcagcaaaatctacgtgtacctggaggagctggagtcctacctggaggtgccttgcacagatccaaccggctacacagacggcctgagcatctatgagcacaagaccatcaagaagatcaaccgggaagtgatcagagagagcaaggactccctgggcctggccaaggcaaggatggccatccacgagagagtgaagcaggagcaggaggtgttcatcgagtccaagaccaaggccaagatcacagccgtgaagaagcaggcccagatcgccgatgtgagcaataccggcacatccaccatcaaggtgtctgaggagagcgccgcaccagtgcagaagcacatctccaacgacaattcttgatctagagggcccgtttaaacccgctgatcagcctcgactgtgccttctagttgccagccatctgttgtttgcccctcccccgtgccttccttgaccctggaaggtgccactcccactgtcctttcctaataaaatgaggaaattgcatcgcattgtctgagtaggtgtcattctattctggggggtggggtggggcaggacagcaagggggaggattgggaagacaatagcaggcatgctggggatgcggtgggctctatggcttctgaggcggaaagaaccagctggggctctagggggtatccccacgcgccctgtagcggcgcattaagcgcggcgggtgtggtggttacgcgcagcgtgaccgctacacttgccagcgccctagcgcccgctcctttcgctttcttcccttcctttctcgccacgttcgccggctttccccgtcaagctctaaatcgggggctccctttagggttccgatttagtgctttacggcacctcgaccccaaaaaacttgattagggtgatggttcacgtagtgggccatcgccctgatagacggtttttcgccctttgacgttggagtccacgttctttaatagtggactcttgttccaaactggaacaacactcaaccctatctcggtctattcttttgatttataagggattttgccgatttcggcctattggttaaaaaatgagctgatttaacaaaaatttaacgcgaattaattctgtggaatgtgtgtcagttagggtgtggaaagtccccaggctccccagcaggcagaagtatgcaaagcatgcatctcaattagtcagcaaccaggtgtggaaagtccccaggctccccagcaggcagaagtatgcaaagcatgcatctcaattagtcagcaaccatagtcccgcccctaactccgcccatcccgcccctaactccgcccagttccgcccattctccgccccatggctgactaattttttttatttatgcagaggccgaggccgcctctgcctctgagctattccagaagtagtgaggaggcttttttggaggcctaggcttttgcaaaaagctcccgggagcttgtatatccattttcggatctgatcaagagacaggatgaggatcgtttcgcatgattgaacaagatggattgcacgcaggttctccggccgcttgggtggagaggctattcggctatgactgggcacaacagacaatcggctgctctgatgccgccgtgttccggctgtcagcgcaggggcgcccggttctttttgtcaagaccgacctgtccggtgccctgaatgaactgcaggacgaggcagcgcggctatcgtggctggccacgacgggcgttccttgcgcagctgtgctcgacgttgtcactgaagcgggaagggactggctgctattgggcgaagtgccggggcaggatctcctgtcatctcaccttgctcctgccgagaaagtatccatcatggctgatgcaatgcggcggctgcatacgcttgatccggctacctgcccattcgaccaccaagcgaaacatcgcatcgagcgagcacgtactcggatggaagccggtcttgtcgatcaggatgatctggacgaagagcatcaggggctcgcgccagccgaactgttcgccaggctcaaggcgcgcatgcccgacggcgaggatctcgtcgtgacccatggcgatgcctgcttgccgaatatcatggtggaaaatggccgcttttctggattcatcgactgtggccggctgggtgtggcggaccgctatcaggacatagcgttggctacccgtgatattgctgaagagcttggcggcgaatgggctgaccgcttcctcgtgctttacggtatcgccgctcccgattcgcagcgcatcgccttctatcgccttcttgacgagttcttctgagcgggactctggggttcgaaatgaccgaccaagcgacgcccaacctgccatcacgagatttcgattccaccgccgccttctatgaaaggttgggcttcggaatcgttttccgggacgccggctggatgatcctccagcgcggggatctcatgctggagttcttcgcccaccccaacttgtttattgcagcttataatggttacaaataaagcaatagcatcacaaatttcacaaataaagcatttttttcactgcattctagttgtggtttgtccaaactcatcaatgtatcttatcatgtctgtataccgtcgacctctagctagagcttggcgtaatcatggtcatagctgtttcctgtgtgaaattgttatccgctcacaattccacacaacatacgagccggaagcataaagtgtaaagcctggggtgcctaatgagtgagctaactcacattaattgcgttgcgctcactgcccgctttccagtcgggaaacctgtcgtgccagctgcattaatgaatcggccaacgcgcggggagaggcggtttgcgtattgggcgctcttccgcttcctcgctcactgactcgctgcgctcggtcgttcggctgcggcgagcggtatcagctcactcaaaggcggtaatacggttatccacagaatcaggggataacgcaggaaagaacatgtgagcaaaaggccagcaaaaggccaggaaccgtaaaaaggccgcgttgctggcgtttttccataggctccgcccccctgacgagcatcacaaaaatcgacgctcaagtcagaggtggcgaaacccgacaggactataaagataccaggcgtttccccctggaagctccctcgtgcgctctcctgttccgaccctgccgcttaccggatacctgtccgcctttctcccttcgggaagcgtggcgctttctcatagctcacgctgtaggtatctcagttcggtgtaggtcgttcgctccaagctgggctgtgtgcacgaaccccccgttcagcccgaccgctgcgccttatccggtaactatcgtcttgagtccaacccggtaagacacgacttatcgccactggcagcagccactggtaacaggattagcagagcgaggtatgtaggcggtgctacagagttcttgaagtggtggcctaactacggctacactagaagaacagtatttggtatctgcgctctgctgaagccagttaccttcggaaaaagagttggtagctcttgatccggcaaacaaaccaccgctggtagcggtttttttgtttgcaagcagcagattacgcgcagaaaaaaaggatctcaagaagatcctttgatcttttctacggggtctgacgctcagtggaacgaaaactcacgttaagggattttggtcatgagattatcaaaaaggatcttcacctagatccttttaaattaaaaatgaagttttaaatcaatctaaagtatatatgagtaaacttggtctgacagttaccaatgcttaatcagtgaggcacctatctcagcgatctgtctatttcgttcatccatagttgcctgactccccgtcgtgtagataactacgatacgggagggcttaccatctggccccagtgctgcaatgataccgcgagacccacgctcaccggctccagatttatcagcaataaaccagccagccggaagggccgagcgcagaagtggtcctgcaactttatccgcctccatccagtctattaattgttgccgggaagctagagtaagtagttcgccagttaatagtttgcgcaacgttgttgccattgctacaggcatcgtggtgtcacgctcgtcgtttggtatggcttcattcagctccggttcccaacgatcaaggcgagttacatgatcccccatgttgtgcaaaaaagcggttagctccttcggtcctccgatcgttgtcagaagtaagttggccgcagtgttatcactcatggttatggcagcactgcataattctcttactgtcatgccatccgtaagatgcttttctgtgactggtgagtactcaaccaagtcattctgagaatagtgtatgcggcgaccgagttgctcttgcccggcgtcaatacgggataataccgcgccacatagcagaactttaaaagtgctcatcattggaaaacgttcttcggggcgaaaactctcaaggatcttaccgctgttgagatccagttcgatgtaacccactcgtgcacccaactgatcttcagcatcttttactttcaccagcgtttctgggtgagcaaaaacaggaaggcaaaatgccgcaaaaaagggaataagggcgacacggaaatgttgaatactcatactcttcctttttcaatattattgaagcatttatcagggttattgtctcatgagcggatacatatttgaatgtatttagaaaaataaacaaataggggttccgcgcacatttccccgaaaagtgccacctgacgtc

SEQ ID NO: 96 - DNA, 7877 bp, synthetic construct
  source 1..7877: mol_type = other DNA
gacggatcgggagatctcccgatcccctatggtgcactctcagtacaatctgctctgatgccgcatagttaagccagtatctgctccctgcttgtgtgttggaggtcgctgagtagtgcgcgagcaaaatttaagctacaacaaggcaaggcttgaccgacaattgcatgaagaatctgcttagggttaggcgttttgcgctgcttcgcgatgtacgggccagatatacgcgttgacattgattattgactagttattaatagtaatcaattacggggtcattagttcatagcccatatatggagttccgcgttacataacttacggtaaatggcccgcctggctgaccgcccaacgacccccgcccattgacgtcaataatgacgtatgttcccatagtaacgccaatagggactttccattgacgtcaatgggtggagtatttacggtaaactgcccacttggcagtacatcaagtgtatcatatgccaagtacgccccctattgacgtcaatgacggtaaatggcccgcctggcattatgcccagtacatgaccttatgggactttcctacttggcagtacatctacgtattagtcatcgctattaccatggtgatgcggttttggcagtacatcaatgggcgtggatagcggtttgactcacggggatttccaagtctccaccccattgacgtcaatgggagtttgttttggcaccaaaatcaacgggactttccaaaatgtcgtaacaactccgccccattgacgcaaatgggcggtaggcgtgtacggtgggaggtctatataagcagagctctctggctaactagagaacccactgcttactggcttatcgaaattaatacgactcactatagggagacccaagctggctagcgtttaaacttaagcttggtaccgccaccatgtacatcagaaacctgagaaagccttctccaaacaagaacgtgttcaagttcgcctccaccaaggtgtccagcgtggtgatgtgcgagagcagcctggagttcgacgcctgcttccaccacgagtacaacgaccttatcgagtctttcggcagccaacctgagggcttcaaatacgagttcatgggcaagtccctgccttatacacctgatgccctgatcagctacaccgataagacacagaaataccacgagtacaagccctactctaagatcgccagccctctgttccgggctgaatttgccgccaagcgggccgcttctctgaaactgggaatcgacctggtcctggtgaccgacagacagatcagagtgaaccctatcctgaacaatctgaagctgctgcatagatacagcggcgtgtacggcatcagcggcatccagaaggaactgctgagctttatccacaaaagcggcgttatcaagctgaatgacatcagcagccaggtgggaatccccatcggcgaaacccggagcttcctgtttggcctcatgcacaagggcctggtgaaggccgacctgggctgtgatgacctgaccaacaaccccaccctgtgggccacacctggcagcggctccggaaaacggacagccgacggaagcgagttcgagtcaccaaagaagaagcggaaagtcggatccggctctggaggcatgaccgatttctttaacgagttcgacgagagcctggtgcccctgaagcctcagaccccaacacagtacgtgaagctggacgatgccaacctgatccagcgggatctggacaccttctccgataccttcaagaatcaggccctgcagagatataagctgatctccaccatcgacaagaagctgtctaggggctggacacagcgcaacctggaccccatcctggacgagctgttcaagggcggcgacgtggtgaggcctaattggcgcacagtggcccggtggagaaagaagtacatcgagtctaacggcgatatcgccagcctggccgacaagaatcacaagatgggcaacaggaccaatcgcatcaagggcgacgataagttctttgataaggccctggagcggttcctggacgccaagagacctacaatcgccaccgcctatcagtactataaggatctgatcgtgatcgagaacgagtccatcgtggagggcaagatcccaatcatctcttacaacgcctttaataagaggatcaaggccatcccaccttatgcagtggcagtggcacgccacggcaagttcaaggccgaccagtggtttgcatactgcgcagcacacgtgccaccaaccagaatcctggagcgggtggagatcgatcacacacccctggacctgatcctgctggacgatgagctgctgatcccaatcggcaggccctatctgacactgctgatcgacgtgttcagcggctgcgtgctgggctttcacctgagctacaagagcccttcctacgtgagcgccgcaaaggcaatcacccacgccatcaagccaaagtccctggatgccctgaacatcgagctgcagaatgactggccctgcttcggcaagtttgagaacctggtggtggacaatggcgccgagttctggtctaagaacctggagcacgcctgtcagagcgccggcatcaacatccagtacaatcctgtgaggaagccctggctgaagccctttatcgagcggttcttcggcgtgatgaacgagtacttcctgcccgagctgcctggcaagaccttttctaatatcctggagaaggaggagtataagcccgagaaggacgccatcatgcggttcagcacatttgtggaggagttccacagatggatcgccgacgtgtaccaccaggactctaatagccgggagaccagaatccctatcaagaggtggcagcagggcttcgatgcctatcctccactgaccatgaacgaggaggaggagacaaggttttccatgctgatgcgcatctccgactctaggaccctgacacgcaatggctttaagtaccaggagctgatgtatgattctaccgccctggccgactaccgcaagcactatccacagacaaaggagaccgtgaagaagctgatcaaggtggaccccgacgatatcagcaaaatctacgtgtacctggaggagctggagtcctacctggaggtgccttgcacagatccaaccggctacacagacggcctgagcatctatgagcacaagaccatcaagaagatcaaccgggaagtgatcagagagagcaaggactccctgggcctggccaaggcaaggatggccatccacgagagagtgaagcaggagcaggaggtgttcatcgagtccaagaccaaggccaagatcacagccgtgaagaagcaggcccagatcgccgatgtgagcaataccggcacatccaccatcaaggtgtctgaggagagcgccgcaccagtgcagaagcacatctcctgatctagagggcccgtttaaacccgctgatcagcctcgactgtgccttctagttgccagccatctgttgtttgcccctcccccgtgccttccttgaccctggaaggtgccactcccactgtcctttcctaataaaatgaggaaattgcatcgcattgtctgagtaggtgtcattctattctggggggtggggtggggcaggacagcaagggggaggattgggaagacaatagcaggcatgctggggatgcggtgggctctatggcttctgaggcggaaagaaccagctggggctctagggggtatccccacgcgccctgtagcggcgcattaagcgcggcgggtgtggtggttacgcgcagcgtgaccgctacacttgccagcgccctagcgcccgctcctttcgctttcttcccttcctttctcgccacgttcgccggctttccccgtcaagctctaaatcgggggctccctttagggttccgatttagtgctttacggcacctcgaccccaaaaaacttgattagggtgatggttcacgtagtgggccatcgccctgatagacggtttttcgccctttgacgttggagtccacgttctttaatagtggactcttgttccaaactggaacaacactcaaccctatctcggtctattcttttgatttataagggattttgccgatttcggcctattggttaaaaaatgagctgatttaacaaaaatttaacgcgaattaattctgtggaatgtgtgtcagttagggtgtggaaagtccccaggctccccagcaggcagaagtatgcaaagcatgcatctcaattagtcagcaaccaggtgtggaaagtccccaggctccccagcaggcagaagtatgcaaagcatgcatctcaattagtcagcaaccatagtcccgcccctaactccgcccatcccgcccctaactccgcccagttccgcccattctccgccccatggctgactaattttttttatttatgcagaggccgaggccgcctctgcctctgagctattccagaagtagtgaggaggcttttttggaggcctaggcttttgcaaaaagctcccgggagcttgtatatccattttcggatctgatcaagagacaggatgaggatcgtttcgcatgattgaacaagatggattgcacgcaggttctccggccgcttgggtggagaggctattcggctatgactgggcacaacagacaatcggctgctctgatgccgccgtgttccggctgtcagcgcaggggcgcccggttctttttgtcaagaccgacctgtccggtgccctgaatgaactgcaggacgaggcagcgcggctatcgtggctggccacgacgggcgttccttgcgcagctgtgctcgacgttgtcactgaagcgggaagggactggctgctattgggcgaagtgccggggcaggatctcctgtcatctcaccttgctcctgccgagaaagtatccatcatggctgatgcaatgcggcggctgcatacgcttgatccggctacctgcccattcgaccaccaagcgaaacatcgcatcgagcgagcacgtactcggatggaagccggtcttgtcgatcaggatgatctggacgaagagcatcaggggctcgcgccagccgaactgttcgccaggctcaaggcgcgcatgcccgacggcgaggatctcgtcgtgacccatggcgatgcctgcttgccgaatatcatggtggaaaatggccgcttttctggattcatcgactgtggccggctgggtgtggcggaccgctatcaggacatagcgttggctacccgtgatattgctgaagagcttggcggcgaatgggctgaccgcttcctcgtgctttacggtatcgccgctcccgattcgcagcgcatcgccttctatcgccttcttgacgagttcttctgagcgggactctggggttcgaaatgaccgaccaagcgacgcccaacctgccatcacgagatttcgattccaccgccgccttctatgaaaggttgggcttcggaatcgttttccgggacgccggctggatgatcctccagcgcggggatctcatgctggagttcttcgcccaccccaacttgtttattgcagcttataatggttacaaataaagcaatagcatcacaaatttcacaaataaagcatttttttcactgcattctagttgtggtttgtccaaactcatcaatgtatcttatcatgtctgtataccgtcgacctctagctagagcttggcgtaatcatggtcatagctgtttcctgtgtgaaattgttatccgctcacaattccacacaacatacgagccggaagcataaagtgtaaagcctggggtgcctaatgagtgagctaactcacattaattgcgttgcgctcactgcccgctttccagtcgggaaacctgtcgtgccagctgcattaatgaatcggccaacgcgcggggagaggcggtttgcgtattgggcgctcttccgcttcctcgctcactgactcgctgcgctcggtcgttcggctgcggcgagcggtatcagctcactcaaaggcggtaatacggttatccacagaatcaggggataacgcaggaaagaacatgtgagcaaaaggccagcaaaaggccaggaaccgtaaaaaggccgcgttgctggcgtttttccataggctccgcccccctgacgagcatcacaaaaatcgacgctcaagtcagaggtggcgaaacccgacaggactataaagataccaggcgtttccccctggaagctccctcgtgcgctctcctgttccgaccctgccgcttaccggatacctgtccgcctttctcccttcgggaagcgtggcgctttctcatagctcacgctgtaggtatctcagttcggtgtaggtcgttcgctccaagctgggctgtgtgcacgaaccccccgttcagcccgaccgctgcgccttatccggtaactatcgtcttgagtccaacccggtaagacacgacttatcgccactggcagcagccactggtaacaggattagcagagcgaggtatgtaggcggtgctacagagttcttgaagtggtggcctaactacggctacactagaagaacagtatttggtatctgcgctctgctgaagccagttaccttcggaaaaagagttggtagctcttgatccggcaaacaaaccaccgctggtagcggtttttttgtttgcaagcagcagattacgcgcagaaaaaaaggatctcaagaagatcctttgatcttttctacggggtctgacgctcagtggaacgaaaactcacgttaagggattttggtcatgagattatcaaaaaggatcttcacctagatccttttaaattaaaaatgaagttttaaatcaatctaaagtatatatgagtaaacttggtctgacagttaccaatgcttaatcagtgaggcacctatctcagcgatctgtctatttcgttcatccatagttgcctgactccccgtcgtgtagataactacgatacgggagggcttaccatctggccccagtgctgcaatgataccgcgagacccacgctcaccggctccagatttatcagcaataaaccagccagccggaagggccgagcgcagaagtggtcctgcaactttatccgcctccatccagtctattaattgttgccgggaagctagagtaagtagttcgccagttaatagtttgcgcaacgttgttgccattgctacaggcatcgtggtgtcacgctcgtcgtttggtatggcttcattcagctccggttcccaacgatcaaggcgagttacatgatcccccatgttgtgcaaaaaagcggttagctccttcggtcctccgatcgttgtcagaagtaagttggccgcagtgttatcactcatggttatggcagcactgcataattctcttactgtcatgccatccgtaagatgcttttctgtgactggtgagtactcaaccaagtcattctgagaatagtgtatgcggcgaccgagttgctcttgcccggcgtcaatacgggataataccgcgccacatagcagaactttaaaagtgctcatcattggaaaacgttcttcggggcgaaaactctcaaggatcttaccgctgttgagatccagttcgatgtaacccactcgtgcacccaactgatcttcagcatcttttactttcaccagcgtttctgggtgagcaaaaacaggaaggcaaaatgccgcaaaaaagggaataagggcgacacggaaatgttgaatactcatactcttcctttttcaatattattgaagcatttatcagggttattgtctcatgagcggatacatatttgaatgtatttagaaaaataaacaaataggggttccgcgcacatttccccgaaaagtgccacctgacgtc

SEQ ID NO: 97 - DNA, 7865 bp, synthetic construct
  source 1..7865: mol_type = other DNA
gacggatcgggagatctcccgatcccctatggtgcactctcagtacaatctgctctgatgccgcatagttaagccagtatctgctccctgcttgtgtgttggaggtcgctgagtagtgcgcgagcaaaatttaagctacaacaaggcaaggcttgaccgacaattgcatgaagaatctgcttagggttaggcgttttgcgctgcttcgcgatgtacgggccagatatacgcgttgacattgattattgactagttattaatagtaatcaattacggggtcattagttcatagcccatatatggagttccgcgttacataacttacggtaaatggcccgcctggctgaccgcccaacgacccccgcccattgacgtcaataatgacgtatgttcccatagtaacgccaatagggactttccattgacgtcaatgggtggagtatttacggtaaactgcccacttggcagtacatcaagtgtatcatatgccaagtacgccccctattgacgtcaatgacggtaaatggcccgcctggcattatgcccagtacatgaccttatgggactttcctacttggcagtacatctacgtattagtcatcgctattaccatggtgatgcggttttggcagtacatcaatgggcgtggatagcggtttgactcacggggatttccaagtctccaccccattgacgtcaatgggagtttgttttggcaccaaaatcaacgggactttccaaaatgtcgtaacaactccgccccattgacgcaaatgggcggtaggcgtgtacggtgggaggtctatataagcagagctctctggctaactagagaacccactgcttactggcttatcgaaattaatacgactcactatagggagacccaagctggctagcgtttaaacttaagcttggtaccgccaccatgtacatcagaaacctgagaaagccttctccaaacaagaacgtgttcaagttcgcctccaccaaggtgtccagcgtggtgatgtgcgagagcagcctggagttcgacgcctgcttccaccacgagtacaacgaccttatcgagtctttcggcagccaacctgagggcttcaaatacgagttcatgggcaagtccctgccttatacacctgatgccctgatcagctacaccgataagacacagaaataccacgagtacaagccctactctaagatcgccagccctctgttccgggctgaatttgccgccaagcgggccgcttctctgaaactgggaatcgacctggtcctggtgaccgacagacagatcagagtgaaccctatcctgaacaatctgaagctgctgcatagatacagcggcgtgtacggcatcagcggcatccagaaggaactgctgagctttatccacaaaagcggcgttatcaagctgaatgacatcagcagccaggtgggaatccccatcggcgaaacccggagcttcctgtttggcctcatgcacaagggcctggtgaaggccgacctgggctgtgatgacctgaccaacaaccccaccctgtgggccacacctggcagcggctccggaaaacggacagccgacggaagcgagttcgagtcaccaaagaagaagcggaaagtcggatccggctctggaggcatgaccgatttctttaacgagttcgacgagagcctggtgcccctgaagcctcagaccccaacacagtacgtgaagctggacgatgccaacctgatccagcgggatctggacaccttctccgataccttcaagaatcaggccctgcagagatataagctgatctccaccatcgacaagaagctgtctaggggctggacacagcgcaacctggaccccatcctggacgagctgttcaagggcggcgacgtggtgaggcctaattggcgcacagtggcccggtggagaaagaagtacatcgagtctaacggcgatatcgccagcctggccgacaagaatcacaagatgggcaacaggaccaatcgcatcaagggcgacgataagttctttgataaggccctggagcggttcctggacgccaagagacctacaatcgccaccgcctatcagtactataaggatctgatcgtgatcgagaacgagtccatcgtggagggcaagatcccaatcatctcttacaacgcctttaataagaggatcaaggccatcccaccttatgcagtggcagtggcacgccacggcaagttcaaggccgaccagtggtttgcatactgcgcagcacacgtgccaccaaccagaatcctggagcgggtggagatcgatcacacacccctggacctgatcctgctggacgatgagctgctgatcccaatcggcaggccctatctgacactgctgatcgacgtgttcagcggctgcgtgctgggctttcacctgagctacaagagcccttcctacgtgagcgccgcaaaggcaatcacccacgccatcaagccaaagtccctggatgccctgaacatcgagctgcagaatgactggccctgcttcggcaagtttgagaacctggtggtggacaatggcgccgagttctggtctaagaacctggagcacgcctgtcagagcgccggcatcaacatccagtacaatcctgtgaggaagccctggctgaagccctttatcgagcggttcttcggcgtgatgaacgagtacttcctgcccgagctgcctggcaagaccttttctaatatcctggagaaggaggagtataagcccgagaaggacgccatcatgcggttcagcacatttgtggaggagttccacagatggatcgccgacgtgtaccaccaggactctaatagccgggagaccagaatccctatcaagaggtggcagcagggcttcgatgcctatcctccactgaccatgaacgaggaggaggagacaaggttttccatgctgatgcgcatctccgactctaggaccctgacacgcaatggctttaagtaccaggagctgatgtatgattctaccgccctggccgactaccgcaagcactatccacagacaaaggagaccgtgaagaagctgatcaaggtggaccccgacgatatcagcaaaatctacgtgtacctggaggagctggagtcctacctggaggtgccttgcacagatccaaccggctacacagacggcctgagcatctatgagcacaagaccatcaagaagatcaaccgggaagtgatcagagagagcaaggactccctgggcctggccaaggcaaggatggccatccacgagagagtgaagcaggagcaggaggtgttcatcgagtccaagaccaaggccaagatcacagccgtgaagaagcaggcccagatcgccgatgtgagcaataccggcacatccaccatcaaggtgtctgaggagagcgccgcaccagtgcagtgatctagagggcccgtttaaacccgctgatcagcctcgactgtgccttctagttgccagccatctgttgtttgcccctcccccgtgccttccttgaccctggaaggtgccactcccactgtcctttcctaataaaatgaggaaattgcatcgcattgtctgagtaggtgtcattctattctggggggtggggtggggcaggacagcaagggggaggattgggaagacaatagcaggcatgctggggatgcggtgggctctatggcttctgaggcggaaagaaccagctggggctctagggggtatccccacgcgccctgtagcggcgcattaagcgcggcgggtgtggtggttacgcgcagcgtgaccgctacacttgccagcgccctagcgcccgctcctttcgctttcttcccttcctttctcgccacgttcgccggctttccccgtcaagctctaaatcgggggctccctttagggttccgatttagtgctttacggcacctcgaccccaaaaaacttgattagggtgatggttcacgtagtgggccatcgccctgatagacggtttttcgccctttgacgttggagtccacgttctttaatagtggactcttgttccaaactggaacaacactcaaccctatctcggtctattcttttgatttataagggattttgccgatttcggcctattggttaaaaaatgagctgatttaacaaaaatttaacgcgaattaattctgtggaatgtgtgtcagttagggtgtggaaagtccccaggctccccagcaggcagaagtatgcaaagcatgcatctcaattagtcagcaaccaggtgtggaaagtccccaggctccccagcaggcagaagtatgcaaagcatgcatctcaattagtcagcaaccatagtcccgcccctaactccgcccatcccgcccctaactccgcccagttccgcccattctccgccccatggctgactaattttttttatttatgcagaggccgaggccgcctctgcctctgagctattccagaagtagtgaggaggcttttttggaggcctaggcttttgcaaaaagctcccgggagcttgtatatccattttcggatctgatcaagagacaggatgaggatcgtttcgcatgattgaacaagatggattgcacgcaggttctccggccgcttgggtggagaggctattcggctatgactgggcacaacagacaatcggctgctctgatgccgccgtgttccggctgtcagcgcaggggcgcccggttctttttgtcaagaccgacctgtccggtgccctgaatgaactgcaggacgaggcagcgcggctatcgtggctggccacgacgggcgttccttgcgcagctgtgctcgacgttgtcactgaagcgggaagggactggctgctattgggcgaagtgccggggcaggatctcctgtcatctcaccttgctcctgccgagaaagtatccatcatggctgatgcaatgcggcggctgcatacgcttgatccggctacctgcccattcgaccaccaagcgaaacatcgcatcgagcgagcacgtactcggatggaagccggtcttgtcgatcaggatgatctggacgaagagcatcaggggctcgcgccagccgaactgttcgccaggctcaaggcgcgcatgcccgacggcgaggatctcgtcgtgacccatggcgatgcctgcttgccgaatatcatggtggaaaatggccgcttttctggattcatcgactgtggccggctgggtgtggcggaccgctatcaggacatagcgttggctacccgtgatattgctgaagagcttggcggcgaatgggctgaccgcttcctcgtgctttacggtatcgccgctcccgattcgcagcgcatcgccttctatcgccttcttgacgagttcttctgagcgggactctggggttcgaaatgaccgaccaagcgacgcccaacctgccatcacgagatttcgattccaccgccgccttctatgaaaggttgggcttcggaatcgttttccgggacgccggctggatgatcctccagcgcggggatctcatgctggagttcttcgcccaccccaacttgtttattgcagcttataatggttacaaataaagcaatagcatcacaaatttcacaaataaagcatttttttcactgcattctagttgtggtttgtccaaactcatcaatgtatcttatcatgtctgtataccgtcgacctctagctagagcttggcgtaatcatggtcatagctgtttcctgtgtgaaattgttatccgctcacaattccacacaacatacgagccggaagcataaagtgtaaagcctggggtgcctaatgagtgagctaactcacattaattgcgttgcgctcactgcccgctttccagtcgggaaacctgtcgtgccagctgcattaatgaatcggccaacgcgcggggagaggcggtttgcgtattgggcgctcttccgcttcctcgctcactgactcgctgcgctcggtcgttcggctgcggcgagcggtatcagctcactcaaaggcggtaatacggttatccacagaatcaggggataacgcaggaaagaacatgtgagcaaaaggccagcaaaaggccaggaaccgtaaaaaggccgcgttgctggcgtttttccataggctccgcccccctgacgagcatcacaaaaatcgacgctcaagtcagaggtggcgaaacccgacaggactataaagataccaggcgtttccccctggaagctccctcgtgcgctctcctgttccgaccctgccgcttaccggatacctgtccgcctttctcccttcgggaagcgtggcgctttctcatagctcacgctgtaggtatctcagttcggtgtaggtcgttcgctccaagctgggctgtgtgcacgaaccccccgttcagcccgaccgctgcgccttatccggtaactatcgtcttgagtccaacccggtaagacacgacttatcgccactggcagcagccactggtaacaggattagcagagcgaggtatgtaggcggtgctacagagttcttgaagtggtggcctaactacggctacactagaagaacagtatttggtatctgcgctctgctgaagccagttaccttcggaaaaagagttggtagctcttgatccggcaaacaaaccaccgctggtagcggtttttttgtttgcaagcagcagattacgcgcagaaaaaaaggatctcaagaagatcctttgatcttttctacggggtctgacgctcagtggaacgaaaactcacgttaagggattttggtcatgagattatcaaaaaggatcttcacctagatccttttaaattaaaaatgaagttttaaatcaatctaaagtatatatgagtaaacttggtctgacagttaccaatgcttaatcagtgaggcacctatctcagcgatctgtctatttcgttcatccatagttgcctgactccccgtcgtgtagataactacgatacgggagggcttaccatctggccccagtgctgcaatgataccgcgagacccacgctcaccggctccagatttatcagcaataaaccagccagccggaagggccgagcgcagaagtggtcctgcaactttatccgcctccatccagtctattaattgttgccgggaagctagagtaagtagttcgccagttaatagtttgcgcaacgttgttgccattgctacaggcatcgtggtgtcacgctcgtcgtttggtatggcttcattcagctccggttcccaacgatcaaggcgagttacatgatcccccatgttgtgcaaaaaagcggttagctccttcggtcctccgatcgttgtcagaagtaagttggccgcagtgttatcactcatggttatggcagcactgcataattctcttactgtcatgccatccgtaagatgcttttctgtgactggtgagtactcaaccaagtcattctgagaatagtgtatgcggcgaccgagttgctcttgcccggcgtcaatacgggataataccgcgccacatagcagaactttaaaagtgctcatcattggaaaacgttcttcggggcgaaaactctcaaggatcttaccgctgttgagatccagttcgatgtaacccactcgtgcacccaactgatcttcagcatcttttactttcaccagcgtttctgggtgagcaaaaacaggaaggcaaaatgccgcaaaaaagggaataagggcgacacggaaatgttgaatactcatactcttcctttttcaatattattgaagcatttatcagggttattgtctcatgagcggatacatatttgaatgtatttagaaaaataaacaaataggggttccgcgcacatttccccgaaaagtgccacctgacgtc

SEQ ID NO: 98 - DNA, 7853 bp, synthetic construct
  source 1..7853: mol_type = other DNA
gacggatcgggagatctcccgatcccctatggtgcactctcagtacaatctgctctgatgccgcatagttaagccagtatctgctccctgcttgtgtgttggaggtcgctgagtagtgcgcgagcaaaatttaagctacaacaaggcaaggcttgaccgacaattgcatgaagaatctgcttagggttaggcgttttgcgctgcttcgcgatgtacgggccagatatacgcgttgacattgattattgactagttattaatagtaatcaattacggggtcattagttcatagcccatatatggagttccgcgttacataacttacggtaaatggcccgcctggctgaccgcccaacgacccccgcccattgacgtcaataatgacgtatgttcccatagtaacgccaatagggactttccattgacgtcaatgggtggagtatttacggtaaactgcccacttggcagtacatcaagtgtatcatatgccaagtacgccccctattgacgtcaatgacggtaaatggcccgcctggcattatgcccagtacatgaccttatgggactttcctacttggcagtacatctacgtattagtcatcgctattaccatggtgatgcggttttggcagtacatcaatgggcgtggatagcggtttgactcacggggatttccaagtctccaccccattgacgtcaatgggagtttgttttggcaccaaaatcaacgggactttccaaaatgtcgtaacaactccgccccattgacgcaaatgggcggtaggcgtgtacggtgggaggtctatataagcagagctctctggctaactagagaacccactgcttactggcttatcgaaattaatacgactcactatagggagacccaagctggctagcgtttaaacttaagcttggtaccgccaccatgtacatcagaaacctgagaaagccttctccaaacaagaacgtgttcaagttcgcctccaccaaggtgtccagcgtggtgatgtgcgagagcagcctggagttcgacgcctgcttccaccacgagtacaacgaccttatcgagtctttcggcagccaacctgagggcttcaaatacgagttcatgggcaagtccctgccttatacacctgatgccctgatcagctacaccgataagacacagaaataccacgagtacaagccctactctaagatcgccagccctctgttccgggctgaatttgccgccaagcgggccgcttctctgaaactgggaatcgacctggtcctggtgaccgacagacagatcagagtgaaccctatcctgaacaatctgaagctgctgcatagatacagcggcgtgtacggcatcagcggcatccagaaggaactgctgagctttatccacaaaagcggcgttatcaagctgaatgacatcagcagccaggtgggaatccccatcggcgaaacccggagcttcctgtttggcctcatgcacaagggcctggtgaaggccgacctgggctgtgatgacctgaccaacaaccccaccctgtgggccacacctggcagcggctccggaaaacggacagccgacggaagcgagttcgagtcaccaaagaagaagcggaaagtcggatccggctctggaggcatgaccgatttctttaacgagttcgacgagagcctggtgcccctgaagcctcagaccccaacacagtacgtgaagctggacgatgccaacctgatccagcgggatctggacaccttctccgataccttcaagaatcaggccctgcagagatataagctgatctccaccatcgacaagaagctgtctaggggctggacacagcgcaacctggaccccatcctggacgagctgttcaagggcggcgacgtggtgaggcctaattggcgcacagtggcccggtggagaaagaagtacatcgagtctaacggcgatatcgccagcctggccgacaagaatcacaagatgggcaacaggaccaatcgcatcaagggcgacgataagttctttgataaggccctggagcggttcctggacgccaagagacctacaatcgccaccgcctatcagtactataaggatctgatcgtgatcgagaacgagtccatcgtggagggcaagatcccaatcatctcttacaacgcctttaataagaggatcaaggccatcccaccttatgcagtggcagtggcacgccacggcaagttcaaggccgaccagtggtttgcatactgcgcagcacacgtgccaccaaccagaatcctggagcgggtggagatcgatcacacacccctggacctgatcctgctggacgatgagctgctgatcccaatcggcaggccctatctgacactgctgatcgacgtgttcagcggctgcgtgctgggctttcacctgagctacaagagcccttcctacgtgagcgccgcaaaggcaatcacccacgccatcaagccaaagtccctggatgccctgaacatcgagctgcagaatgactggccctgcttcggcaagtttgagaacctggtggtggacaatggcgccgagttctggtctaagaacctggagcacgcctgtcagagcgccggcatcaacatccagtacaatcctgtgaggaagccctggctgaagccctttatcgagcggttcttcggcgtgatgaacgagtacttcctgcccgagctgcctggcaagaccttttctaatatcctggagaaggaggagtataagcccgagaaggacgccatcatgcggttcagcacatttgtggaggagttccacagatggatcgccgacgtgtaccaccaggactctaatagccgggagaccagaatccctatcaagaggtggcagcagggcttcgatgcctatcctccactgaccatgaacgaggaggaggagacaaggttttccatgctgatgcgcatctccgactctaggaccctgacacgcaatggctttaagtaccaggagctgatgtatgattctaccgccctggccgactaccgcaagcactatccacagacaaaggagaccgtgaagaagctgatcaaggtggaccccgacgatatcagcaaaatctacgtgtacctggaggagctggagtcctacctggaggtgccttgcacagatccaaccggctacacagacggcctgagcatctatgagcacaagaccatcaagaagatcaaccgggaagtgatcagagagagcaaggactccctgggcctggccaaggcaaggatggccatccacgagagagtgaagcaggagcaggaggtgttcatcgagtccaagaccaaggccaagatcacagccgtgaagaagcaggcccagatcgccgatgtgagcaataccggcacatccaccatcaaggtgtctgaggagagcgcctgatctagagggcccgtttaaacccgctgatcagcctcgactgtgccttctagttgccagccatctgttgtttgcccctcccccgtgccttccttgaccctggaaggtgccactcccactgtcctttcctaataaaatgaggaaattgcatcgcattgtctgagtaggtgtcattctattctggggggtggggtggggcaggacagcaagggggaggattgggaagacaatagcaggcatgctggggatgcggtgggctctatggcttctgaggcggaaagaaccagctggggctctagggggtatccccacgcgccctgtagcggcgcattaagcgcggcgggtgtggtggttacgcgcagcgtgaccgctacacttgccagcgccctagcgcccgctcctttcgctttcttcccttcctttctcgccacgttcgccggctttccccgtcaagctctaaatcgggggctccctttagggttccgatttagtgctttacggcacctcgaccccaaaaaacttgattagggtgatggttcacgtagtgggccatcgccctgatagacggtttttcgccctttgacgttggagtccacgttctttaatagtggactcttgttccaaactggaacaacactcaaccctatctcggtctattcttttgatttataagggattttgccgatttcggcctattggttaaaaaatgagctgatttaacaaaaatttaacgcgaattaattctgtggaatgtgtgtcagttagggtgtggaaagtccccaggctccccagcaggcagaagtatgcaaagcatgcatctcaattagtcagcaaccaggtgtggaaagtccccaggctccccagcaggcagaagtatgcaaagcatgcatctcaattagtcagcaaccatagtcccgcccctaactccgcccatcccgcccctaactccgcccagttccgcccattctccgccccatggctgactaattttttttatttatgcagaggccgaggccgcctctgcctctgagctattccagaagtagtgaggaggcttttttggaggcctaggcttttgcaaaaagctcccgggagcttgtatatccattttcggatctgatcaagagacaggatgaggatcgtttcgcatgattgaacaagatggattgcacgcaggttctccggccgcttgggtggagaggctattcggctatgactgggcacaacagacaatcggctgctctgatgccgccgtgttccggctgtcagcgcaggggcgcccggttctttttgtcaagaccgacctgtccggtgccctgaatgaactgcaggacgaggcagcgcggctatcgtggctggccacgacgggcgttccttgcgcagctgtgctcgacgttgtcactgaagcgggaagggactggctgctattgggcgaagtgccggggcaggatctcctgtcatctcaccttgctcctgccgagaaagtatccatcatggctgatgcaatgcggcggctgcatacgcttgatccggctacctgcccattcgaccaccaagcgaaacatcgcatcgagcgagcacgtactcggatggaagccggtcttgtcgatcaggatgatctggacgaagagcatcaggggctcgcgccagccgaactgttcgccaggctcaaggcgcgcatgcccgacggcgaggatctcgtcgtgacccatggcgatgcctgcttgccgaatatcatggtggaaaatggccgcttttctggattcatcgactgtggccggctgggtgtggcggaccgctatcaggacatagcgttggctacccgtgatattgctgaagagcttggcggcgaatgggctgaccgcttcctcgtgctttacggtatcgccgctcccgattcgcagcgcatcgccttctatcgccttcttgacgagttcttctgagcgggactctggggttcgaaatgaccgaccaagcgacgcccaacctgccatcacgagatttcgattccaccgccgccttctatgaaaggttgggcttcggaatcgttttccgggacgccggctggatgatcctccagcgcggggatctcatgctggagttcttcgcccaccccaacttgtttattgcagcttataatggttacaaataaagcaatagcatcacaaatttcacaaataaagcatttttttcactgcattctagttgtggtttgtccaaactcatcaatgtatcttatcatgtctgtataccgtcgacctctagctagagcttggcgtaatcatggtcatagctgtttcctgtgtgaaattgttatccgctcacaattccacacaacatacgagccggaagcataaagtgtaaagcctggggtgcctaatgagtgagctaactcacattaattgcgttgcgctcactgcccgctttccagtcgggaaacctgtcgtgccagctgcattaatgaatcggccaacgcgcggggagaggcggtttgcgtattgggcgctcttccgcttcctcgctcactgactcgctgcgctcggtcgttcggctgcggcgagcggtatcagctcactcaaaggcggtaatacggttatccacagaatcaggggataacgcaggaaagaacatgtgagcaaaaggccagcaaaaggccaggaaccgtaaaaaggccgcgttgctggcgtttttccataggctccgcccccctgacgagcatcacaaaaatcgacgctcaagtcagaggtggcgaaacccgacaggactataaagataccaggcgtttccccctggaagctccctcgtgcgctctcctgttccgaccctgccgcttaccggatacctgtccgcctttctcccttcgggaagcgtggcgctttctcatagctcacgctgtaggtatctcagttcggtgtaggtcgttcgctccaagctgggctgtgtgcacgaaccccccgttcagcccgaccgctgcgccttatccggtaactatcgtcttgagtccaacccggtaagacacgacttatcgccactggcagcagccactggtaacaggattagcagagcgaggtatgtaggcggtgctacagagttcttgaagtggtggcctaactacggctacactagaagaacagtatttggtatctgcgctctgctgaagccagttaccttcggaaaaagagttggtagctcttgatccggcaaacaaaccaccgctggtagcggtttttttgtttgcaagcagcagattacgcgcagaaaaaaaggatctcaagaagatcctttgatcttttctacggggtctgacgctcagtggaacgaaaactcacgttaagggattttggtcatgagattatcaaaaaggatcttcacctagatccttttaaattaaaaatgaagttttaaatcaatctaaagtatatatgagtaaacttggtctgacagttaccaatgcttaatcagtgaggcacctatctcagcgatctgtctatttcgttcatccatagttgcctgactccccgtcgtgtagataactacgatacgggagggcttaccatctggccccagtgctgcaatgataccgcgagacccacgctcaccggctccagatttatcagcaataaaccagccagccggaagggccgagcgcagaagtggtcctgcaactttatccgcctccatccagtctattaattgttgccgggaagctagagtaagtagttcgccagttaatagtttgcgcaacgttgttgccattgctacaggcatcgtggtgtcacgctcgtcgtttggtatggcttcattcagctccggttcccaacgatcaaggcgagttacatgatcccccatgttgtgcaaaaaagcggttagctccttcggtcctccgatcgttgtcagaagtaagttggccgcagtgttatcactcatggttatggcagcactgcataattctcttactgtcatgccatccgtaagatgcttttctgtgactggtgagtactcaaccaagtcattctgagaatagtgtatgcggcgaccgagttgctcttgcccggcgtcaatacgggataataccgcgccacatagcagaactttaaaagtgctcatcattggaaaacgttcttcggggcgaaaactctcaaggatcttaccgctgttgagatccagttcgatgtaacccactcgtgcacccaactgatcttcagcatcttttactttcaccagcgtttctgggtgagcaaaaacaggaaggcaaaatgccgcaaaaaagggaataagggcgacacggaaatgttgaatactcatactcttcctttttcaatattattgaagcatttatcagggttattgtctcatgagcggatacatatttgaatgtatttagaaaaataaacaaataggggttccgcgcacatttccccgaaaagtgccacctgacgtc

SEQ ID NO: 99 - DNA, 7841 bp, synthetic construct
  source 1..7841: mol_type = other DNA
gacggatcgggagatctcccgatcccctatggtgcactctcagtacaatctgctctgatgccgcatagttaagccagtatctgctccctgcttgtgtgttggaggtcgctgagtagtgcgcgagcaaaatttaagctacaacaaggcaaggcttgaccgacaattgcatgaagaatctgcttagggttaggcgttttgcgctgcttcgcgatgtacgggccagatatacgcgttgacattgattattgactagttattaatagtaatcaattacggggtcattagttcatagcccatatatggagttccgcgttacataacttacggtaaatggcccgcctggctgaccgcccaacgacccccgcccattgacgtcaataatgacgtatgttcccatagtaacgccaatagggactttccattgacgtcaatgggtggagtatttacggtaaactgcccacttggcagtacatcaagtgtatcatatgccaagtacgccccctattgacgtcaatgacggtaaatggcccgcctggcattatgcccagtacatgaccttatgggactttcctacttggcagtacatctacgtattagtcatcgctattaccatggtgatgcggttttggcagtacatcaatgggcgtggatagcggtttgactcacggggatttccaagtctccaccccattgacgtcaatgggagtttgttttggcaccaaaatcaacgggactttccaaaatgtcgtaacaactccgccccattgacgcaaatgggcggtaggcgtgtacggtgggaggtctatataagcagagctctctggctaactagagaacccactgcttactggcttatcgaaattaatacgactcactatagggagacccaagctggctagcgtttaaacttaagcttggtaccgccaccatgtacatcagaaacctgagaaagccttctccaaacaagaacgtgttcaagttcgcctccaccaaggtgtccagcgtggtgatgtgcgagagcagcctggagttcgacgcctgcttccaccacgagtacaacgaccttatcgagtctttcggcagccaacctgagggcttcaaatacgagttcatgggcaagtccctgccttatacacctgatgccctgatcagctacaccgataagacacagaaataccacgagtacaagccctactctaagatcgccagccctctgttccgggctgaatttgccgccaagcgggccgcttctctgaaactgggaatcgacctggtcctggtgaccgacagacagatcagagtgaaccctatcctgaacaatctgaagctgctgcatagatacagcggcgtgtacggcatcagcggcatccagaaggaactgctgagctttatccacaaaagcggcgttatcaagctgaatgacatcagcagccaggtgggaatccccatcggcgaaacccggagcttcctgtttggcctcatgcacaagggcctggtgaaggccgacctgggctgtgatgacctgaccaacaaccccaccctgtgggccacacctggcagcggctccggaaaacggacagccgacggaagcgagttcgagtcaccaaagaagaagcggaaagtcggatccggctctggaggcatgaccgatttctttaacgagttcgacgagagcctggtgcccctgaagcctcagaccccaacacagtacgtgaagctggacgatgccaacctgatccagcgggatctggacaccttctccgataccttcaagaatcaggccctgcagagatataagctgatctccaccatcgacaagaagctgtctaggggctggacacagcgcaacctggaccccatcctggacgagctgttcaagggcggcgacgtggtgaggcctaattggcgcacagtggcccggtggagaaagaagtacatcgagtctaacggcgatatcgccagcctggccgacaagaatcacaagatgggcaacaggaccaatcgcatcaagggcgacgataagttctttgataaggccctggagcggttcctggacgccaagagacctacaatcgccaccgcctatcagtactataaggatctgatcgtgatcgagaacgagtccatcgtggagggcaagatcccaatcatctcttacaacgcctttaataagaggatcaaggccatcccaccttatgcagtggcagtggcacgccacggcaagttcaaggccgaccagtggtttgcatactgcgcagcacacgtgccaccaaccagaatcctggagcgggtggagatcgatcacacacccctggacctgatcctgctggacgatgagctgctgatcccaatcggcaggccctatctgacactgctgatcgacgtgttcagcggctgcgtgctgggctttcacctgagctacaagagcccttcctacgtgagcgccgcaaaggcaatcacccacgccatcaagccaaagtccctggatgccctgaacatcgagctgcagaatgactggccctgcttcggcaagtttgagaacctggtggtggacaatggcgccgagttctggtctaagaacctggagcacgcctgtcagagcgccggcatcaacatccagtacaatcctgtgaggaagccctggctgaagccctttatcgagcggttcttcggcgtgatgaacgagtacttcctgcccgagctgcctggcaagaccttttctaatatcctggagaaggaggagtataagcccgagaaggacgccatcatgcggttcagcacatttgtggaggagttccacagatggatcgccgacgtgtaccaccaggactctaatagccgggagaccagaatccctatcaagaggtggcagcagggcttcgatgcctatcctccactgaccatgaacgaggaggaggagacaaggttttccatgctgatgcgcatctccgactctaggaccctgacacgcaatggctttaagtaccaggagctgatgtatgattctaccgccctggccgactaccgcaagcactatccacagacaaaggagaccgtgaagaagctgatcaaggtggaccccgacgatatcagcaaaatctacgtgtacctggaggagctggagtcctacctggaggtgccttgcacagatccaaccggctacacagacggcctgagcatctatgagcacaagaccatcaagaagatcaaccgggaagtgatcagagagagcaaggactccctgggcctggccaaggcaaggatggccatccacgagagagtgaagcaggagcaggaggtgttcatcgagtccaagaccaaggccaagatcacagccgtgaagaagcaggcccagatcgccgatgtgagcaataccggcacatccaccatcaaggtgtcttgatctagagggcccgtttaaacccgctgatcagcctcgactgtgccttctagttgccagccatctgttgtttgcccctcccccgtgccttccttgaccctggaaggtgccactcccactgtcctttcctaataaaatgaggaaattgcatcgcattgtctgagtaggtgtcattctattctggggggtggggtggggcaggacagcaagggggaggattgggaagacaatagcaggcatgctggggatgcggtgggctctatggcttctgaggcggaaagaaccagctggggctctagggggtatccccacgcgccctgtagcggcgcattaagcgcggcgggtgtggtggttacgcgcagcgtgaccgctacacttgccagcgccctagcgcccgctcctttcgctttcttcccttcctttctcgccacgttcgccggctttccccgtcaagctctaaatcgggggctccctttagggttccgatttagtgctttacggcacctcgaccccaaaaaacttgattagggtgatggttcacgtagtgggccatcgccctgatagacggtttttcgccctttgacgttggagtccacgttctttaatagtggactcttgttccaaactggaacaacactcaaccctatctcggtctattcttttgatttataagggattttgccgatttcggcctattggttaaaaaatgagctgatttaacaaaaatttaacgcgaattaattctgtggaatgtgtgtcagttagggtgtggaaagtccccaggctccccagcaggcagaagtatgcaaagcatgcatctcaattagtcagcaaccaggtgtggaaagtccccaggctccccagcaggcagaagtatgcaaagcatgcatctcaattagtcagcaaccatagtcccgcccctaactccgcccatcccgcccctaactccgcccagttccgcccattctccgccccatggctgactaattttttttatttatgcagaggccgaggccgcctctgcctctgagctattccagaagtagtgaggaggcttttttggaggcctaggcttttgcaaaaagctcccgggagcttgtatatccattttcggatctgatcaagagacaggatgaggatcgtttcgcatgattgaacaagatggattgcacgcaggttctccggccgcttgggtggagaggctattcggctatgactgggcacaacagacaatcggctgctctgatgccgccgtgttccggctgtcagcgcaggggcgcccggttctttttgtcaagaccgacctgtccggtgccctgaatgaactgcaggacgaggcagcgcggctatcgtggctggccacgacgggcgttccttgcgcagctgtgctcgacgttgtcactgaagcgggaagggactggctgctattgggcgaagtgccggggcaggatctcctgtcatctcaccttgctcctgccgagaaagtatccatcatggctgatgcaatgcggcggctgcatacgcttgatccggctacctgcccattcgaccaccaagcgaaacatcgcatcgagcgagcacgtactcggatggaagccggtcttgtcgatcaggatgatctggacgaagagcatcaggggctcgcgccagccgaactgttcgccaggctcaaggcgcgcatgcccgacggcgaggatctcgtcgtgacccatggcgatgcctgcttgccgaatatcatggtggaaaatggccgcttttctggattcatcgactgtggccggctgggtgtggcggaccgctatcaggacatagcgttggctacccgtgatattgctgaagagcttggcggcgaatgggctgaccgcttcctcgtgctttacggtatcgccgctcccgattcgcagcgcatcgccttctatcgccttcttgacgagttcttctgagcgggactctggggttcgaaatgaccgaccaagcgacgcccaacctgccatcacgagatttcgattccaccgccgccttctatgaaaggttgggcttcggaatcgttttccgggacgccggctggatgatcctccagcgcggggatctcatgctggagttcttcgcccaccccaacttgtttattgcagcttataatggttacaaataaagcaatagcatcacaaatttcacaaataaagcatttttttcactgcattctagttgtggtttgtccaaactcatcaatgtatcttatcatgtctgtataccgtcgacctctagctagagcttggcgtaatcatggtcatagctgtttcctgtgtgaaattgttatccgctcacaattccacacaacatacgagccggaagcataaagtgtaaagcctggggtgcctaatgagtgagctaactcacattaattgcgttgcgctcactgcccgctttccagtcgggaaacctgtcgtgccagctgcattaatgaatcggccaacgcgcggggagaggcggtttgcgtattgggcgctcttccgcttcctcgctcactgactcgctgcgctcggtcgttcggctgcggcgagcggtatcagctcactcaaaggcggtaatacggttatccacagaatcaggggataacgcaggaaagaacatgtgagcaaaaggccagcaaaaggccaggaaccgtaaaaaggccgcgttgctggcgtttttccataggctccgcccccctgacgagcatcacaaaaatcgacgctcaagtcagaggtggcgaaacccgacaggactataaagataccaggcgtttccccctggaagctccctcgtgcgctctcctgttccgaccctgccgcttaccggatacctgtccgcctttctcccttcgggaagcgtggcgctttctcatagctcacgctgtaggtatctcagttcggtgtaggtcgttcgctccaagctgggctgtgtgcacgaaccccccgttcagcccgaccgctgcgccttatccggtaactatcgtcttgagtccaacccggtaagacacgacttatcgccactggcagcagccactggtaacaggattagcagagcgaggtatgtaggcggtgctacagagttcttgaagtggtggcctaactacggctacactagaagaacagtatttggtatctgcgctctgctgaagccagttaccttcggaaaaagagttggtagctcttgatccggcaaacaaaccaccgctggtagcggtttttttgtttgcaagcagcagattacgcgcagaaaaaaaggatctcaagaagatcctttgatcttttctacggggtctgacgctcagtggaacgaaaactcacgttaagggattttggtcatgagattatcaaaaaggatcttcacctagatccttttaaattaaaaatgaagttttaaatcaatctaaagtatatatgagtaaacttggtctgacagttaccaatgcttaatcagtgaggcacctatctcagcgatctgtctatttcgttcatccatagttgcctgactccccgtcgtgtagataactacgatacgggagggcttaccatctggccccagtgctgcaatgataccgcgagacccacgctcaccggctccagatttatcagcaataaaccagccagccggaagggccgagcgcagaagtggtcctgcaactttatccgcctccatccagtctattaattgttgccgggaagctagagtaagtagttcgccagttaatagtttgcgcaacgttgttgccattgctacaggcatcgtggtgtcacgctcgtcgtttggtatggcttcattcagctccggttcccaacgatcaaggcgagttacatgatcccccatgttgtgcaaaaaagcggttagctccttcggtcctccgatcgttgtcagaagtaagttggccgcagtgttatcactcatggttatggcagcactgcataattctcttactgtcatgccatccgtaagatgcttttctgtgactggtgagtactcaaccaagtcattctgagaatagtgtatgcggcgaccgagttgctcttgcccggcgtcaatacgggataataccgcgccacatagcagaactttaaaagtgctcatcattggaaaacgttcttcggggcgaaaactctcaaggatcttaccgctgttgagatccagttcgatgtaacccactcgtgcacccaactgatcttcagcatcttttactttcaccagcgtttctgggtgagcaaaaacaggaaggcaaaatgccgcaaaaaagggaataagggcgacacggaaatgttgaatactcatactcttcctttttcaatattattgaagcatttatcagggttattgtctcatgagcggatacatatttgaatgtatttagaaaaataaacaaataggggttccgcgcacatttccccgaaaagtgccacctgacgtc

SEQ ID NO: 100 - DNA, 7725 bp, synthetic construct
  source 1..7725: mol_type = other DNA
gacggatcgggagatctcccgatcccctatggtgcactctcagtacaatctgctctgatgccgcatagttaagccagtatctgctccctgcttgtgtgttggaggtcgctgagtagtgcgcgagcaaaatttaagctacaacaaggcaaggcttgaccgacaattgcatgaagaatctgcttagggttaggcgttttgcgctgcttcgcgatgtacgggccagatatacgcgttgacattgattattgactagttattaatagtaatcaattacggggtcattagttcatagcccatatatggagttccgcgttacataacttacggtaaatggcccgcctggctgaccgcccaacgacccccgcccattgacgtcaataatgacgtatgttcccatagtaacgccaatagggactttccattgacgtcaatgggtggagtatttacggtaaactgcccacttggcagtacatcaagtgtatcatatgccaagtacgccccctattgacgtcaatgacggtaaatggcccgcctggcattatgcccagtacatgaccttatgggactttcctacttggcagtacatctacgtattagtcatcgctattaccatggtgatgcggttttggcagtacatcaatgggcgtggatagcggtttgactcacggggatttccaagtctccaccccattgacgtcaatgggagtttgttttggcaccaaaatcaacgggactttccaaaatgtcgtaacaactccgccccattgacgcaaatgggcggtaggcgtgtacggtgggaggtctatataagcagagctctctggctaactagagaacccactgcttactggcttatcgaaattaatacgactcactatagggagacccaagctggctagcgtttaaacttaagcttggtaccgagctcggatccgccaccatgggcaaacggacagccgacggaagcgagttcgagtcaccgaaaaagaagcgaaaagttggctccggaatgctcaatcaagaactggaactcagtttaaatatggctttcgccagagcgcgcgagcaccgtcatgagtttatgaccgtcgagcacttgttactggcgctgctcagtaacccatctgcccgggaggcgctggaagcgtgttctgtggatttggttgcgctccgtcaggaactggaagcctttattgaacaaaccacacccgttctgcctgccagtgaagaggagcgcgacacacagccgacgctgagttttcagcgtgtactgcaacgtgcggtcttccatgtccagtcctccggtcgcaatgaggttaccggtgcaaacgttctggtcgctatctttagcgaacaggagtcgcaggcggcatatctgttgcgtaaacatgaagtcagccgtctcgatgtggtgaattttatctctcatggcacgcgtaaagacgagccgacacagtcttctgatcctggcagccagccaaacagcgaagaacaagctggtggggaggaacgtatggagaatttcacgacgaacctgaatcagcttgcgcgcgtgggcggaatcgacccactgattggtcgtgagaaggagcttgagcgtgctattcaggttctctgccgtcgccgtaaaaacaacccgctgctggtgggggaatctggtgtcggtaaaaccgcgattgcagaaggtcttgcctggcgaattgttcagggcgatgtgccggaagtgatggctgactgtacaatttactctctcgatatcggttctctgttagcgggcactaaatatcgcggcgactttgaaaaacgttttaaagcgttgctcaagcagctggagcaggacactaacagcatcctgtttattgatgagatccacaccattatcggtgcgggtgcagcgtctggtggccaggtcgatgcggctaacctgatcaaaccgttgctctccagcggtaaaattcgcgtaattggttcgacaacctatcaggagttcagcaacattttcgagaaagaccgtgctctggcgcgtcgcttccagaaaattgatattactgaaccgtcgatcgaagaaactgttcaaatcatcaatggcctgaaaccgaagtatgaagcgcaccacgacgtgcgttataccgcaaaagcggtgcgtgcggcggtagagctggcggtgaaatacattaacgatcgtcatctgccggataaagccattgatgttatcgacgaagcgggcgctcgcgcacgtctgatgccggtaagcaaacgcaagaaaaccgttaatgtggcggatattgagtccgtggtggcccgtattgcacgcattccagagaagagtgtttctcagagtgaccgcgataccctgaaaaacctcggcgatcgcctgaaaatgctggtcttcggccaggataaagccattgaggcgctgactgaagccattaagatggcgcgtgcaggtttaggtcacgaacataaaccggtcggttcgttcctgtttgccggtcctaccggggtcgggaaaacagaggtgacggtacagctttcgaaagcgttgggcattgagcttctgcgctttgatatgtccgagtatatggaacgccataccgtcagccgtctgattggtgcgcctccgggatacgttggttttgatcagggcggtttgctgactgatgcggtcatcaagcatccacatgcggttctgctgctggacgaaatcgagaaagcgcaccctgacgtgttcaatattctgttgcaggtgatggacaacggtacgctgaccgataacaacggacgcaaagcggacttccgtaacgtggtgctggtgatgaccaccaacgccggggtacgtgaaactgagcgtaaatccattggtcttatccaccaggataacagcaccgatgcgatggaagagattaagaagatctttacaccggaattccgtaaccgtctcgacaacattatctggtttgatcatctgtcaaccgacgtgatccatcaggtggtggataaattcatcgtcgagttgcaggttcagctggatcagaaaggtgtttctctggaagtgagccaggaagcgcgtaactggctggccgagaaaggttacgaccgggcaatgggcgcacgtccgatggcgcgtgtcatccaggacaacctgaaaaaaacgctcgccaacgaactgctgtttggttcgctggtggacggcggtcaggtcaccgtcgcgctggataaagagaaaaatgagctgacttacggattccagagtgcacaaaagcacaaggcggaagcagcgcattaattctagagggcccgtttaaacccgctgatcagcctcgactgtgccttctagttgccagccatctgttgtttgcccctcccccgtgccttccttgaccctggaaggtgccactcccactgtcctttcctaataaaatgaggaaattgcatcgcattgtctgagtaggtgtcattctattctggggggtggggtggggcaggacagcaagggggaggattgggaagacaatagcaggcatgctggggatgcggtgggctctatggcttctgaggcggaaagaaccagctggggctctagggggtatccccacgcgccctgtagcggcgcattaagcgcggcgggtgtggtggttacgcgcagcgtgaccgctacacttgccagcgccctagcgcccgctcctttcgctttcttcccttcctttctcgccacgttcgccggctttccccgtcaagctctaaatcgggggctccctttagggttccgatttagtgctttacggcacctcgaccccaaaaaacttgattagggtgatggttcacgtagtgggccatcgccctgatagacggtttttcgccctttgacgttggagtccacgttctttaatagtggactcttgttccaaactggaacaacactcaaccctatctcggtctattcttttgatttataagggattttgccgatttcggcctattggttaaaaaatgagctgatttaacaaaaatttaacgcgaattaattctgtggaatgtgtgtcagttagggtgtggaaagtccccaggctccccagcaggcagaagtatgcaaagcatgcatctcaattagtcagcaaccaggtgtggaaagtccccaggctccccagcaggcagaagtatgcaaagcatgcatctcaattagtcagcaaccatagtcccgcccctaactccgcccatcccgcccctaactccgcccagttccgcccattctccgccccatggctgactaattttttttatttatgcagaggccgaggccgcctctgcctctgagctattccagaagtagtgaggaggcttttttggaggcctaggcttttgcaaaaagctcccgggagcttgtatatccattttcggatctgatcaagagacaggatgaggatcgtttcgcatgattgaacaagatggattgcacgcaggttctccggccgcttgggtggagaggctattcggctatgactgggcacaacagacaatcggctgctctgatgccgccgtgttccggctgtcagcgcaggggcgcccggttctttttgtcaagaccgacctgtccggtgccctgaatgaactgcaggacgaggcagcgcggctatcgtggctggccacgacgggcgttccttgcgcagctgtgctcgacgttgtcactgaagcgggaagggactggctgctattgggcgaagtgccggggcaggatctcctgtcatctcaccttgctcctgccgagaaagtatccatcatggctgatgcaatgcggcggctgcatacgcttgatccggctacctgcccattcgaccaccaagcgaaacatcgcatcgagcgagcacgtactcggatggaagccggtcttgtcgatcaggatgatctggacgaagagcatcaggggctcgcgccagccgaactgttcgccaggctcaaggcgcgcatgcccgacggcgaggatctcgtcgtgacccatggcgatgcctgcttgccgaatatcatggtggaaaatggccgcttttctggattcatcgactgtggccggctgggtgtggcggaccgctatcaggacatagcgttggctacccgtgatattgctgaagagcttggcggcgaatgggctgaccgcttcctcgtgctttacggtatcgccgctcccgattcgcagcgcatcgccttctatcgccttcttgacgagttcttctgagcgggactctggggttcgaaatgaccgaccaagcgacgcccaacctgccatcacgagatttcgattccaccgccgccttctatgaaaggttgggcttcggaatcgttttccgggacgccggctggatgatcctccagcgcggggatctcatgctggagttcttcgcccaccccaacttgtttattgcagcttataatggttacaaataaagcaatagcatcacaaatttcacaaataaagcatttttttcactgcattctagttgtggtttgtccaaactcatcaatgtatcttatcatgtctgtataccgtcgacctctagctagagcttggcgtaatcatggtcatagctgtttcctgtgtgaaattgttatccgctcacaattccacacaacatacgagccggaagcataaagtgtaaagcctggggtgcctaatgagtgagctaactcacattaattgcgttgcgctcactgcccgctttccagtcgggaaacctgtcgtgccagctgcattaatgaatcggccaacgcgcggggagaggcggtttgcgtattgggcgctcttccgcttcctcgctcactgactcgctgcgctcggtcgttcggctgcggcgagcggtatcagctcactcaaaggcggtaatacggttatccacagaatcaggggataacgcaggaaagaacatgtgagcaaaaggccagcaaaaggccaggaaccgtaaaaaggccgcgttgctggcgtttttccataggctccgcccccctgacgagcatcacaaaaatcgacgctcaagtcagaggtggcgaaacccgacaggactataaagataccaggcgtttccccctggaagctccctcgtgcgctctcctgttccgaccctgccgcttaccggatacctgtccgcctttctcccttcgggaagcgtggcgctttctcatagctcacgctgtaggtatctcagttcggtgtaggtcgttcgctccaagctgggctgtgtgcacgaaccccccgttcagcccgaccgctgcgccttatccggtaactatcgtcttgagtccaacccggtaagacacgacttatcgccactggcagcagccactggtaacaggattagcagagcgaggtatgtaggcggtgctacagagttcttgaagtggtggcctaactacggctacactagaagaacagtatttggtatctgcgctctgctgaagccagttaccttcggaaaaagagttggtagctcttgatccggcaaacaaaccaccgctggtagcggtttttttgtttgcaagcagcagattacgcgcagaaaaaaaggatctcaagaagatcctttgatcttttctacggggtctgacgctcagtggaacgaaaactcacgttaagggattttggtcatgagattatcaaaaaggatcttcacctagatccttttaaattaaaaatgaagttttaaatcaatctaaagtatatatgagtaaacttggtctgacagttaccaatgcttaatcagtgaggcacctatctcagcgatctgtctatttcgttcatccatagttgcctgactccccgtcgtgtagataactacgatacgggagggcttaccatctggccccagtgctgcaatgataccgcgagacccacgctcaccggctccagatttatcagcaataaaccagccagccggaagggccgagcgcagaagtggtcctgcaactttatccgcctccatccagtctattaattgttgccgggaagctagagtaagtagttcgccagttaatagtttgcgcaacgttgttgccattgctacaggcatcgtggtgtcacgctcgtcgtttggtatggcttcattcagctccggttcccaacgatcaaggcgagttacatgatcccccatgttgtgcaaaaaagcggttagctccttcggtcctccgatcgttgtcagaagtaagttggccgcagtgttatcactcatggttatggcagcactgcataattctcttactgtcatgccatccgtaagatgcttttctgtgactggtgagtactcaaccaagtcattctgagaatagtgtatgcggcgaccgagttgctcttgcccggcgtcaatacgggataataccgcgccacatagcagaactttaaaagtgctcatcattggaaaacgttcttcggggcgaaaactctcaaggatcttaccgctgttgagatccagttcgatgtaacccactcgtgcacccaactgatcttcagcatcttttactttcaccagcgtttctgggtgagcaaaaacaggaaggcaaaatgccgcaaaaaagggaataagggcgacacggaaatgttgaatactcatactcttcctttttcaatattattgaagcatttatcagggttattgtctcatgagcggatacatatttgaatgtatttagaaaaataaacaaataggggttccgcgcacatttccccgaaaagtgccacctgacgtc

SEQ ID NO: 101 - DNA, 8022 bp, synthetic construct
  source 1..8022: mol_type = other DNA
gacggatcgggagatctcccgatcccctatggtgcactctcagtacaatctgctctgatgccgcatagttaagccagtatctgctccctgcttgtgtgttggaggtcgctgagtagtgcgcgagcaaaatttaagctacaacaaggcaaggcttgaccgacaattgcatgaagaatctgcttagggttaggcgttttgcgctgcttcgcgatgtacgggccagatatacgcgttgacattgattattgactagttattaatagtaatcaattacggggtcattagttcatagcccatatatggagttccgcgttacataacttacggtaaatggcccgcctggctgaccgcccaacgacccccgcccattgacgtcaataatgacgtatgttcccatagtaacgccaatagggactttccattgacgtcaatgggtggagtatttacggtaaactgcccacttggcagtacatcaagtgtatcatatgccaagtacgccccctattgacgtcaatgacggtaaatggcccgcctggcattatgcccagtacatgaccttatgggactttcctacttggcagtacatctacgtattagtcatcgctattaccatggtgatgcggttttggcagtacatcaatgggcgtggatagcggtttgactcacggggatttccaagtctccaccccattgacgtcaatgggagtttgttttggcaccaaaatcaacgggactttccaaaatgtcgtaacaactccgccccattgacgcaaatgggcggtaggcgtgtacggtgggaggtctatataagcagagctctctggctaactagagaacccactgcttactggcttatcgaaattaatacgactcactatagggagacccaagctggctagcgtttaaacttaagcttggtaccgagctcggatccgccaccatgggcaaacggacagccgacggaagcgagttcgagtcaccgaaaaagaagcgaaaagttggctccggaatgcgtctggatcgtcttactaataaattccagcttgctcttgccgatgcccaatcacttgcactcgggcacgacaaccaattcatcgaaccacttcatttaatgagcgccctgctgaatcaggaagggggttcggttagtcctttgttaacatcagctggcataaatgctggccagttgcgcacagatatcaatcaggcattaaatcgtttaccgcaggttgaaggtactggtggtgatgtccagccatcacaggatctggtgcgcgttcttaatctttgcgacaagctggcgcaaaaacgtggtgataactttatctcgtcagaactgttcgttctggcggcacttgagtctcgcggcacgctggccgacatcctgaaagcagcaggggcgaccaccgccaacattactcaagcgattgaacaaatgcgtggaggtgaaagcgtgaacgatcaaggtgctgaagaccaacgtcaggctttgaaaaaatataccatcgaccttaccgaacgagccgaacagggcaaactcgatccggtgattggtcgtgatgaagaaattcgccgtaccattcaggtgctgcaacgtcgtactaaaaataacccggtactgattggtgaacccggcgtcggtaaaactgccatcgttgaaggtctggcgcagcgtattatcaacggcgaagtgccggaagggttgaaaggccgccgggtactggcgctggatatgggcgcgctggtggctggggcgaaatatcgcggtgagtttgaagaacgtttaaaaggcgtgcttaacgatcttgccaaacaggaaggcaacgtcatcctgtttatcgacgaattacataccatggtcggcgcgggtaaagccgatggcgcaatggacgccggaaacatgctgaaaccggcgctggcgcgtggtgaattgcactgcgtaggtgccacgacgcttgacgaatatcgccagtacatcgaaaaagatgctgcgctggaacgtcgtttccagaaagtgtttgttgccgagccttctgttgaagataccattgcgattctgcgtggcctgaaagaacgttacgaattgcaccaccatgtgcaaattactgacccggcaattgttgcagcggcgacgttgtctcatcgctacattgctgaccgtcagctgccggataaagccatcgacctgatcgatgaagcagcatccagcattcgtatgcagattgactcaaaaccagaagaactcgaccgactcgatcgtcgtatcatccagctcaaactggaacaacaggcgttaatgaaagagtctgatgaagccagtaaaaaacgcctggatatgctcaacgaagaactgagcgacaaagaacgtcaatactccgagttagaagaagagtggaaagcagagaaggcatcgctttctggtacgcagaccattaaagcggaactggaacaggcgaaaatcgctattgaacaggctcgccgtgtgggggacctggcgcggatgtctgaactgcaatacggcaaaatcccggaactggaaaagcaactggaagccgcaacgcagctcgaaggcaaaactatgcgtctgttgcgtaataaagtgaccgacgccgaaattgctgaagtgctggcgcgttggacggggattccggtttctcgcatgatggaaagcgagcgcgaaaaactgctgcgtatggagcaagaactgcaccatcgcgtaattggtcagaacgaagcggttgatgcggtatctaacgctattcgtcgtagccgtgcggggctggcggatccaaatcgcccgattggttcattcctgttcctcggcccaactggtgtggggaaaacagagctttgtaaggcgctggcgaactttatgtttgatagcgacgaggcgatggtccgtatcgatatgtccgagtttatggagaaacactcggtgtctcgtctggttggtgcgcctccgggatatgtcggttatgaagaaggtggctacctgaccgaagctgtgcgtcgtcgtccgtattccgtcatcctgctggatgaagtggaaaaagcgcatccggatgtcttcaatattctgttgcaggtactggatgatgggcgtctgactgacgggcaggggagaacggtcgacttccgtaatacggttgtcattatgacctctaacctcggttccgatctgattcaggaacgcttcggtgaactggattatgcgcacatgaaagagctggtgctcggtgtggttagccataacttccgtccggaattcattaaccgtatcgatgaagtggtggtcttccatccgctgggtgaacagcacattgcgtcgattgcgcagattcagttgaaacgtctgtataaacgtctggaagaacgtggttatgaaatccacatttctgacgaggcgctgaaactgctgagcgagaacggttacgatccggtctatggtgcacgtcctctgaaacgtgcaattcagcagcagatcgaaaacccgctggcacagcaaatactgtctggtgaattggttccgggtaaagtgattcgcctggaagttaatgaagaccggattgtcgccgtccagtaattctagagggcccgtttaaacccgctgatcagcctcgactgtgccttctagttgccagccatctgttgtttgcccctcccccgtgccttccttgaccctggaaggtgccactcccactgtcctttcctaataaaatgaggaaattgcatcgcattgtctgagtaggtgtcattctattctggggggtggggtggggcaggacagcaagggggaggattgggaagacaatagcaggcatgctggggatgcggtgggctctatggcttctgaggcggaaagaaccagctggggctctagggggtatccccacgcgccctgtagcggcgcattaagcgcggcgggtgtggtggttacgcgcagcgtgaccgctacacttgccagcgccctagcgcccgctcctttcgctttcttcccttcctttctcgccacgttcgccggctttccccgtcaagctctaaatcgggggctccctttagggttccgatttagtgctttacggcacctcgaccccaaaaaacttgattagggtgatggttcacgtagtgggccatcgccctgatagacggtttttcgccctttgacgttggagtccacgttctttaatagtggactcttgttccaaactggaacaacactcaaccctatctcggtctattcttttgatttataagggattttgccgatttcggcctattggttaaaaaatgagctgatttaacaaaaatttaacgcgaattaattctgtggaatgtgtgtcagttagggtgtggaaagtccccaggctccccagcaggcagaagtatgcaaagcatgcatctcaattagtcagcaaccaggtgtggaaagtccccaggctccccagcaggcagaagtatgcaaagcatgcatctcaattagtcagcaaccatagtcccgcccctaactccgcccatcccgcccctaactccgcccagttccgcccattctccgccccatggctgactaattttttttatttatgcagaggccgaggccgcctctgcctctgagctattccagaagtagtgaggaggcttttttggaggcctaggcttttgcaaaaagctcccgggagcttgtatatccattttcggatctgatcaagagacaggatgaggatcgtttcgcatgattgaacaagatggattgcacgcaggttctccggccgcttgggtggagaggctattcggctatgactgggcacaacagacaatcggctgctctgatgccgccgtgttccggctgtcagcgcaggggcgcccggttctttttgtcaagaccgacctgtccggtgccctgaatgaactgcaggacgaggcagcgcggctatcgtggctggccacgacgggcgttccttgcgcagctgtgctcgacgttgtcactgaagcgggaagggactggctgctattgggcgaagtgccggggcaggatctcctgtcatctcaccttgctcctgccgagaaagtatccatcatggctgatgcaatgcggcggctgcatacgcttgatccggctacctgcccattcgaccaccaagcgaaacatcgcatcgagcgagcacgtactcggatggaagccggtcttgtcgatcaggatgatctggacgaagagcatcaggggctcgcgccagccgaactgttcgccaggctcaaggcgcgcatgcccgacggcgaggatctcgtcgtgacccatggcgatgcctgcttgccgaatatcatggtggaaaatggccgcttttctggattcatcgactgtggccggctgggtgtggcggaccgctatcaggacatagcgttggctacccgtgatattgctgaagagcttggcggcgaatgggctgaccgcttcctcgtgctttacggtatcgccgctcccgattcgcagcgcatcgccttctatcgccttcttgacgagttcttctgagcgggactctggggttcgaaatgaccgaccaagcgacgcccaacctgccatcacgagatttcgattccaccgccgccttctatgaaaggttgggcttcggaatcgttttccgggacgccggctggatgatcctccagcgcggggatctcatgctggagttcttcgcccaccccaacttgtttattgcagcttataatggttacaaataaagcaatagcatcacaaatttcacaaataaagcatttttttcactgcattctagttgtggtttgtccaaactcatcaatgtatcttatcatgtctgtataccgtcgacctctagctagagcttggcgtaatcatggtcatagctgtttcctgtgtgaaattgttatccgctcacaattccacacaacatacgagccggaagcataaagtgtaaagcctggggtgcctaatgagtgagctaactcacattaattgcgttgcgctcactgcccgctttccagtcgggaaacctgtcgtgccagctgcattaatgaatcggccaacgcgcggggagaggcggtttgcgtattgggcgctcttccgcttcctcgctcactgactcgctgcgctcggtcgttcggctgcggcgagcggtatcagctcactcaaaggcggtaatacggttatccacagaatcaggggataacgcaggaaagaacatgtgagcaaaaggccagcaaaaggccaggaaccgtaaaaaggccgcgttgctggcgtttttccataggctccgcccccctgacgagcatcacaaaaatcgacgctcaagtcagaggtggcgaaacccgacaggactataaagataccaggcgtttccccctggaagctccctcgtgcgctctcctgttccgaccctgccgcttaccggatacctgtccgcctttctcccttcgggaagcgtggcgctttctcatagctcacgctgtaggtatctcagttcggtgtaggtcgttcgctccaagctgggctgtgtgcacgaaccccccgttcagcccgaccgctgcgccttatccggtaactatcgtcttgagtccaacccggtaagacacgacttatcgccactggcagcagccactggtaacaggattagcagagcgaggtatgtaggcggtgctacagagttcttgaagtggtggcctaactacggctacactagaagaacagtatttggtatctgcgctctgctgaagccagttaccttcggaaaaagagttggtagctcttgatccggcaaacaaaccaccgctggtagcggtttttttgtttgcaagcagcagattacgcgcagaaaaaaaggatctcaagaagatcctttgatcttttctacggggtctgacgctcagtggaacgaaaactcacgttaagggattttggtcatgagattatcaaaaaggatcttcacctagatccttttaaattaaaaatgaagttttaaatcaatctaaagtatatatgagtaaacttggtctgacagttaccaatgcttaatcagtgaggcacctatctcagcgatctgtctatttcgttcatccatagttgcctgactccccgtcgtgtagataactacgatacgggagggcttaccatctggccccagtgctgcaatgataccgcgagacccacgctcaccggctccagatttatcagcaataaaccagccagccggaagggccgagcgcagaagtggtcctgcaactttatccgcctccatccagtctattaattgttgccgggaagctagagtaagtagttcgccagttaatagtttgcgcaacgttgttgccattgctacaggcatcgtggtgtcacgctcgtcgtttggtatggcttcattcagctccggttcccaacgatcaaggcgagttacatgatcccccatgttgtgcaaaaaagcggttagctccttcggtcctccgatcgttgtcagaagtaagttggccgcagtgttatcactcatggttatggcagcactgcataattctcttactgtcatgccatccgtaagatgcttttctgtgactggtgagtactcaaccaagtcattctgagaatagtgtatgcggcgaccgagttgctcttgcccggcgtcaatacgggataataccgcgccacatagcagaactttaaaagtgctcatcattggaaaacgttcttcggggcgaaaactctcaaggatcttaccgctgttgagatccagttcgatgtaacccactcgtgcacccaactgatcttcagcatcttttactttcaccagcgtttctgggtgagcaaaaacaggaaggcaaaatgccgcaaaaaagggaataagggcgacacggaaatgttgaatactcatactcttcctttttcaatattattgaagcatttatcagggttattgtctcatgagcggatacatatttgaatgtatttagaaaaataaacaaataggggttccgcgcacatttccccgaaaagtgccacctgacgtc

SEQ ID NO: 102 - DNA, 6072 bp, synthetic construct
  source 1..6072: mol_type = other DNA
gacggatcgggagatctcccgatcccctatggtgcactctcagtacaatctgctctgatgccgcatagttaagccagtatctgctccctgcttgtgtgttggaggtcgctgagtagtgcgcgagcaaaatttaagctacaacaaggcaaggcttgaccgacaattgcatgaagaatctgcttagggttaggcgttttgcgctgcttcgcgatgtacgggccagatatacgcgttgacattgattattgactagttattaatagtaatcaattacggggtcattagttcatagcccatatatggagttccgcgttacataacttacggtaaatggcccgcctggctgaccgcccaacgacccccgcccattgacgtcaataatgacgtatgttcccatagtaacgccaatagggactttccattgacgtcaatgggtggagtatttacggtaaactgcccacttggcagtacatcaagtgtatcatatgccaagtacgccccctattgacgtcaatgacggtaaatggcccgcctggcattatgcccagtacatgaccttatgggactttcctacttggcagtacatctacgtattagtcatcgctattaccatggtgatgcggttttggcagtacatcaatgggcgtggatagcggtttgactcacggggatttccaagtctccaccccattgacgtcaatgggagtttgttttggcaccaaaatcaacgggactttccaaaatgtcgtaacaactccgccccattgacgcaaatgggcggtaggcgtgtacggtgggaggtctatataagcagagctctctggctaactagagaacccactgcttactggcttatcgaaattaatacgactcactatagggagacccaagctggctagcgtttaaacttaagcttggtaccgagctcggatccgccaccatgggcaaacggacagccgacggaagcgagttcgagtcaccgaaaaagaagcgaaaagttggctccggaatgtcatacagcggcgaacgagataactttgcaccccatatggcgctggtgccgatggtcattgaacagacctcacgcggtgagcgctcttttgatatctattctcgtctacttaaggaacgcgtcatttttctgactggccaggttgaagaccacatggctaacctgattgtggcgcagatgctgttcctggaagcggaaaacccagaaaaagatatctatctgtacattaactccccaggcggggtgatcactgccgggatgtctatctatgacaccatgcagtttatcaagcctgatgtcagcaccatctgtatgggccaggcggcctcgatgggcgctttcttgctgaccgcaggggcaaaaggtaaacgtttttgcctgccgaattcgcgcgtgatgattcaccaaccattgggcggctaccagggccaggcgaccgatatcgaaattcatgcccgtgaaattctgaaagttaaagggcgcatgaatgaacttatggcgcttcatacgggtcaatcattagaacagattgaacgtgataccgagcgcgatcgcttcctttccgcccctgaagcggtggaatacggtctggtcgattcgattctgacccatcgtaattgattctagagggcccgtttaaacccgctgatcagcctcgactgtgccttctagttgccagccatctgttgtttgcccctcccccgtgccttccttgaccctggaaggtgccactcccactgtcctttcctaataaaatgaggaaattgcatcgcattgtctgagtaggtgtcattctattctggggggtggggtggggcaggacagcaagggggaggattgggaagacaatagcaggcatgctggggatgcggtgggctctatggcttctgaggcggaaagaaccagctggggctctagggggtatccccacgcgccctgtagcggcgcattaagcgcggcgggtgtggtggttacgcgcagcgtgaccgctacacttgccagcgccctagcgcccgctcctttcgctttcttcccttcctttctcgccacgttcgccggctttccccgtcaagctctaaatcgggggctccctttagggttccgatttagtgctttacggcacctcgaccccaaaaaacttgattagggtgatggttcacgtagtgggccatcgccctgatagacggtttttcgccctttgacgttggagtccacgttctttaatagtggactcttgttccaaactggaacaacactcaaccctatctcggtctattcttttgatttataagggattttgccgatttcggcctattggttaaaaaatgagctgatttaacaaaaatttaacgcgaattaattctgtggaatgtgtgtcagttagggtgtggaaagtccccaggctccccagcaggcagaagtatgcaaagcatgcatctcaattagtcagcaaccaggtgtggaaagtccccaggctccccagcaggcagaagtatgcaaagcatgcatctcaattagtcagcaaccatagtcccgcccctaactccgcccatcccgcccctaactccgcccagttccgcccattctccgccccatggctgactaattttttttatttatgcagaggccgaggccgcctctgcctctgagctattccagaagtagtgaggaggcttttttggaggcctaggcttttgcaaaaagctcccgggagcttgtatatccattttcggatctgatcaagagacaggatgaggatcgtttcgcatgattgaacaagatggattgcacgcaggttctccggccgcttgggtggagaggctattcggctatgactgggcacaacagacaatcggctgctctgatgccgccgtgttccggctgtcagcgcaggggcgcccggttctttttgtcaagaccgacctgtccggtgccctgaatgaactgcaggacgaggcagcgcggctatcgtggctggccacgacgggcgttccttgcgcagctgtgctcgacgttgtcactgaagcgggaagggactggctgctattgggcgaagtgccggggcaggatctcctgtcatctcaccttgctcctgccgagaaagtatccatcatggctgatgcaatgcggcggctgcatacgcttgatccggctacctgcccattcgaccaccaagcgaaacatcgcatcgagcgagcacgtactcggatggaagccggtcttgtcgatcaggatgatctggacgaagagcatcaggggctcgcgccagccgaactgttcgccaggctcaaggcgcgcatgcccgacggcgaggatctcgtcgtgacccatggcgatgcctgcttgccgaatatcatggtggaaaatggccgcttttctggattcatcgactgtggccggctgggtgtggcggaccgctatcaggacatagcgttggctacccgtgatattgctgaagagcttggcggcgaatgggctgaccgcttcctcgtgctttacggtatcgccgctcccgattcgcagcgcatcgccttctatcgccttcttgacgagttcttctgagcgggactctggggttcgaaatgaccgaccaagcgacgcccaacctgccatcacgagatttcgattccaccgccgccttctatgaaaggttgggcttcggaatcgttttccgggacgccggctggatgatcctccagcgcggggatctcatgctggagttcttcgcccaccccaacttgtttattgcagcttataatggttacaaataaagcaatagcatcacaaatttcacaaataaagcatttttttcactgcattctagttgtggtttgtccaaactcatcaatgtatcttatcatgtctgtataccgtcgacctctagctagagcttggcgtaatcatggtcatagctgtttcctgtgtgaaattgttatccgctcacaattccacacaacatacgagccggaagcataaagtgtaaagcctggggtgcctaatgagtgagctaactcacattaattgcgttgcgctcactgcccgctttccagtcgggaaacctgtcgtgccagctgcattaatgaatcggccaacgcgcggggagaggcggtttgcgtattgggcgctcttccgcttcctcgctcactgactcgctgcgctcggtcgttcggctgcggcgagcggtatcagctcactcaaaggcggtaatacggttatccacagaatcaggggataacgcaggaaagaacatgtgagcaaaaggccagcaaaaggccaggaaccgtaaaaaggccgcgttgctggcgtttttccataggctccgcccccctgacgagcatcacaaaaatcgacgctcaagtcagaggtggcgaaacccgacaggactataaagataccaggcgtttccccctggaagctccctcgtgcgctctcctgttccgaccctgccgcttaccggatacctgtccgcctttctcccttcgggaagcgtggcgctttctcatagctcacgctgtaggtatctcagttcggtgtaggtcgttcgctccaagctgggctgtgtgcacgaaccccccgttcagcccgaccgctgcgccttatccggtaactatcgtcttgagtccaacccggtaagacacgacttatcgccactggcagcagccactggtaacaggattagcagagcgaggtatgtaggcggtgctacagagttcttgaagtggtggcctaactacggctacactagaagaacagtatttggtatctgcgctctgctgaagccagttaccttcggaaaaagagttggtagctcttgatccggcaaacaaaccaccgctggtagcggtttttttgtttgcaagcagcagattacgcgcagaaaaaaaggatctcaagaagatcctttgatcttttctacggggtctgacgctcagtggaacgaaaactcacgttaagggattttggtcatgagattatcaaaaaggatcttcacctagatccttttaaattaaaaatgaagttttaaatcaatctaaagtatatatgagtaaacttggtctgacagttaccaatgcttaatcagtgaggcacctatctcagcgatctgtctatttcgttcatccatagttgcctgactccccgtcgtgtagataactacgatacgggagggcttaccatctggccccagtgctgcaatgataccgcgagacccacgctcaccggctccagatttatcagcaataaaccagccagccggaagggccgagcgcagaagtggtcctgcaactttatccgcctccatccagtctattaattgttgccgggaagctagagtaagtagttcgccagttaatagtttgcgcaacgttgttgccattgctacaggcatcgtggtgtcacgctcgtcgtttggtatggcttcattcagctccggttcccaacgatcaaggcgagttacatgatcccccatgttgtgcaaaaaagcggttagctccttcggtcctccgatcgttgtcagaagtaagttggccgcagtgttatcactcatggttatggcagcactgcataattctcttactgtcatgccatccgtaagatgcttttctgtgactggtgagtactcaaccaagtcattctgagaatagtgtatgcggcgaccgagttgctcttgcccggcgtcaatacgggataataccgcgccacatagcagaactttaaaagtgctcatcattggaaaacgttcttcggggcgaaaactctcaaggatcttaccgctgttgagatccagttcgatgtaacccactcgtgcacccaactgatcttcagcatcttttactttcaccagcgtttctgggtgagcaaaaacaggaaggcaaaatgccgcaaaaaagggaataagggcgacacggaaatgttgaatactcatactcttcctttttcaatattattgaagcatttatcagggttattgtctcatgagcggatacatatttgaatgtatttagaaaaataaacaaataggggttccgcgcacatttccccgaaaagtgccacctgacgtc

SEQ ID NO: 103 - DNA, 32 bp, synthetic construct
  source 1..32: mol_type = other DNA
aatgcaggcaaatcaaccttagtctgaaggcc

SEQ ID NO: 104 - DNA, 32 bp, synthetic construct
  source 1..32: mol_type = other DNA
ttaagaagtaagttgtgttcttctttgcctag

SEQ ID NO: 105 - DNA, 32 bp, synthetic construct
  source 1..32: mol_type = other DNA
tcaggagactgtgtaacaccaatgcaggcaaa

SEQ ID NO: 106 - DNA, 32 bp, synthetic construct
  source 1..32: mol_type = other DNA
taggcaaagaagaacacaacttacttcttaag

SEQ ID NO: 107 - DNA, 32 bp, synthetic construct
  source 1..32: mol_type = other DNA
ttgcgacgtagggataacagggtaatcctcag

SEQ ID NO: 108 - DNA, 32 bp, synthetic construct
  source 1..32: mol_type = other DNA
cttgcgacgtagggataacagggtaatcctca

SEQ ID NO: 109 - DNA, 32 bp, synthetic construct
  source 1..32: mol_type = other DNA
agtgtgatggatatctgcagaattcgcccttg

SEQ ID NO: 110 - DNA, 20 bp, synthetic construct
  source 1..20: mol_type = other DNA
atgagctctcttcaacgtta

SEQ ID NO: 111 - DNA, 20 bp, synthetic construct
  source 1..20: mol_type = other DNA
gggcacagtcctcaggtttg

SEQ ID NO: 112 - DNA, 20 bp, synthetic construct
  source 1..20: mol_type = other DNA
atgttaaaatccgaaaatgc

SEQ ID NO: 113 - DNA, 20 bp, synthetic construct
  source 1..20: mol_type = other DNA
ccttggtgaagtctcctttg

SEQ ID NO: 114 - DNA, 32 bp, synthetic construct
  source 1..32: mol_type = other DNA
aaggaaatagaactgtatttaaagaataactg

SEQ ID NO: 115 - DNA, 32 bp, synthetic construct
  source 1..32: mol_type = other DNA
tcaaaggagacttcaccaaggaaatagaactg

SEQ ID NO: 116 - DNA, 32 bp, synthetic construct
  source 1..32: mol_type = other DNA
ttggtgaagtctcctttgaggtactaaattta

SEQ ID NO: 117 - DNA, 32 bp, synthetic construct
  source 1..32: mol_type = other DNA
tttgaggtactaaatttagcactgtcaatcag

SEQ ID NO: 118 - DNA, 32 bp, synthetic construct
  source 1..32: mol_type = other DNA
aagggcttaaccaggaagacctcgggtgtatg

SEQ ID NO: 119 - DNA, 32 bp, synthetic construct
  source 1..32: mol_type = other DNA
gtccacattaggccgcagagagctcagggctg

SEQ ID NO: 120 - DNA, 32 bp, synthetic construct; identical to SEQ ID NO: 119
  source 1..32: mol_type = other DNA

SEQ ID NO: 121 - DNA, 32 bp, synthetic construct
  source 1..32: mol_type = other DNA
gctcccgcattaaaatttcatgggcgctgcag

SEQ ID NO: 122 - DNA, 32 bp, synthetic construct
  source 1..32: mol_type = other DNA
gaggagtggttgtgagccgtcctgtaggtggg

SEQ ID NO: 123 - DNA, 32 bp, synthetic construct
  source 1..32: mol_type = other DNA
tcggtgaccctagaaattggagcaaattacga

SEQ ID NO: 124 - DNA, 32 bp, synthetic construct
  source 1..32: mol_type = other DNA
ctgcgctttgcttcaagttcttagtagaatcc

SEQ ID NO: 125 - DNA, 32 bp, synthetic construct
  source 1..32: mol_type = other DNA
cctcccgttcctttctcccgctccttgcaaac

SEQ ID NO: 126 - DNA, 32 bp, synthetic construct
  source 1..32: mol_type = other DNA
tgaatggctttactcagagagctggtgctggg

SEQ ID NO: 127 - DNA, 32 bp, synthetic construct
  source 1..32: mol_type = other DNA
actcagatgtgctgctgcggtgtcctttgtgc

SEQ ID NO: 128 - DNA, 32 bp, synthetic construct
  source 1..32: mol_type = other DNA
tcagcagagggcagggcgccaagccttcccac

SEQ ID NO: 129 - DNA, 20 bp, synthetic construct
  source 1..20: mol_type = other DNA
gcgcccatgaaattttaatg

SEQ ID NO: 130 - DNA, 20 bp, synthetic construct
  source 1..20: mol_type = other DNA
atgcgggaggctgagcgcac

SEQ ID NO: 131 - DNA, 20 bp, synthetic construct
  source 1..20: mol_type = other DNA
cattaggccgcagagagctc

SEQ ID NO: 132 - DNA, 20 bp, synthetic construct
  source 1..20: mol_type = other DNA
gcttctgcgcccctggtccg

SEQ ID NO: 133 - DNA, 20 bp, synthetic construct
  source 1..20: mol_type = other DNA
cgggagaaaggaacgggagg

SEQ ID NO: 134 - DNA, 20 bp, synthetic construct
  source 1..20: mol_type = other DNA
aagaacttgaagcaaagcgc

SEQ ID NO: 135 - DNA, 20 bp, synthetic construct
  source 1..20: mol_type = other DNA
tccaatttctagggtcaccg

SEQ ID NO: 136 - DNA, 20 bp, synthetic construct
  source 1..20: mol_type = other DNA
gttgtgagccgtcctgtagg

SEQ ID NO: 137 - DNA, 20 bp, synthetic construct
  source 1..20: mol_type = other DNA
tggcgccctgccctctgctg

SEQ ID NO: 138 - DNA, 20 bp, synthetic construct
  source 1..20: mol_type = other DNA
accgcagcagcacatctgag

SEQ ID NO: 139 - DNA, 20 bp, synthetic construct
  source 1..20: mol_type = other DNA
aatggctttactcagagagc

SEQ ID NO: 140 - DNA, 32 bp, synthetic construct
  source 1..32: mol_type = other DNA
gcgaggtattcggctccgcgacggaggctaag

SEQ ID NO: 141 - DNA, 32 bp, synthetic construct
  source 1..32: mol_type = other DNA
aggggtccgagagctcagctagtcttcttcct

SEQ ID NO: 142 - DNA, 32 bp, synthetic construct
  source 1..32: mol_type = other DNA
gagctgggaccaccttatattcccagggccgg

SEQ ID NO: 143 - DNA, 32 bp, synthetic construct
  source 1..32: mol_type = other DNA
cagggccggttaatgtggctctggttctgggt

SEQ ID NO: 144 - DNA, 32 bp, synthetic construct
  source 1..32: mol_type = other DNA
cctccaccccacagtggggccactagggacag

SEQ ID NO: 145 - DNA, 32 bp, synthetic construct
  source 1..32: mol_type = other DNA
acagtggggccactagggacaggattggtgac

SEQ ID NO: 146 - DNA, 32 bp, synthetic construct
  source 1..32: mol_type = other DNA
ttaggcctcctccttcctagtctcctgatatt

SEQ ID NO: 147 - DNA, 32 bp, synthetic construct
  source 1..32: mol_type = other DNA
tgttaggcagattccttatctggtgacacacc

SEQ ID NO: 148 - DNA, 32 bp, synthetic construct; identical to SEQ ID NO: 145
  source 1..32: mol_type = other DNA

SEQ ID NO: 149 - DNA, 32 bp, synthetic construct; identical to SEQ ID NO: 142
  source 1..32: mol_type = other DNA

SEQ ID NO: 150 - DNA, 32 bp, synthetic construct
  source 1..32: mol_type = other DNA
ccagggtgtgctgggcaggtcgcggggagcgc

SEQ ID NO: 151 - DNA, 32 bp, synthetic construct
  source 1..32: mol_type = other DNA
ctgcttcctccagagggcgtcgcaggacagct

SEQ ID NO: 152 - DNA, 32 bp, synthetic construct
  source 1..32: mol_type = other DNA
cggagctgcgccctttctcactggttctctct

SEQ ID NO: 153 - DNA, 32 bp, synthetic construct
  source 1..32: mol_type = other DNA
gtaggactctcttctctgacctgagtctcctt

SEQ ID NO: 154 - DNA, 32 bp, synthetic construct
  source 1..32: mol_type = other DNA
atgaggctggtgtaaagcggccttggagtgtg

SEQ ID NO: 155 - DNA, 32 bp, synthetic construct
  source 1..32: mol_type = other DNA
tctcctcactgtgccctgaaaagtatttctta

SEQ ID NO: 156 - DNA, 32 bp, synthetic construct
  source 1..32: mol_type = other DNA
tttagggagcttaaattctacttgggggaaac

SEQ ID NO: 157 - DNA, 32 bp, synthetic construct
  source 1..32: mol_type = other DNA
attgcttactaaagtcctttacccagcacctc

SEQ ID NO: 158 - DNA, 32 bp, synthetic construct
  source 1..32: mol_type = other DNA
cacaattcaaactactgtcaaagtagttttgt

SEQ ID NO: 159 - DNA, 32 bp, synthetic construct
  source 1..32: mol_type = other DNA
tgaaatcttaggtaggctaatgcctacaaagt

SEQ ID NO: 160 - DNA, 32 bp, synthetic construct
  source 1..32: mol_type = other DNA
aaaggattctaacagctctcttacttgagcca

SEQ ID NO: 161 - DNA, 32 bp, synthetic construct
  source 1..32: mol_type = other DNA
tgtgctccagaattagtgatttgctttggtgc

SEQ ID NO: 162 - DNA, 32 bp, synthetic construct
  source 1..32: mol_type = other DNA
tggcaagcaagatgaccacttgctgttcccat

SEQ ID NO: 163 - DNA, 32 bp, synthetic construct
  source 1..32: mol_type = other DNA
tgacccagtgaaccaggccccaggacagctcg

SEQ ID NO: 164 - DNA, 32 bp, synthetic construct
  source 1..32: mol_type = other DNA
tgctcaccgggacctgaatgtcatgacctcgg

SEQ ID NO: 165 - DNA, 32 bp, synthetic construct
  source 1..32: mol_type = other DNA
tggcgagagcacctcggcctcgttctcagggc

SEQ ID NO: 166 - DNA, 32 bp, synthetic construct
  source 1..32: mol_type = other DNA
gttgtctgacacttgtcacaaaccgctaggag

SEQ ID NO: 167 - DNA, 32 bp, synthetic construct
  source 1..32: mol_type = other DNA
agtacagcgcggctgaaatcatcattaaagcg

SEQ ID NO: 168 - protein, 29 aa, synthetic construct
GCGCGKRTADGSEFESPKKKRKVGSGSGG

SEQ ID NO: 169 - protein, 16 aa, synthetic construct
KRPAATKKAGQAKKKK

SEQ ID NO: 170 - protein, 25 aa, synthetic construct
MSRRRKANPTKLSENAKKLAKEVEN

SEQ ID NO: 171 - protein, 18 aa, synthetic construct
KRTADGSEFESPKKKRKV

SEQ ID NO: 172 - DNA, 28 bp, synthetic construct
  source 1..28: mol_type = other DNA
gtgaactgccgagtaggtagctgataac

SEQ ID NO: 173 - skipped

SEQ ID NO: 174 - RNA, 20 nt, synthetic construct
  source 1..20: mol_type = other RNA
gtgaactgccgagtaggtag

SEQ ID NO: 175 - DNA, 28 bp, synthetic construct
  source 1..28: mol_type = other DNA
gtgacctgccgtataggcagctgaaaat

SEQ ID NO: 176 - skipped

SEQ ID NO: 177 - RNA, 20 nt, synthetic construct
  source 1..20: mol_type = other RNA
gtgacctgccgtataggcag

SEQ ID NO: 178 - DNA, 28 bp, synthetic construct
  source 1..28: mol_type = other DNA
gtgacctgccgtataggcagctgaagat

SEQ ID NO: 179 - DNA, 28 bp, synthetic construct
  source 1..28: mol_type = other DNA
taattctgccgaaaaggcagtgagtagt

SEQ ID NO: 180 - skipped

SEQ ID NO: 181 - RNA, 20 nt, synthetic construct
  source 1..20: mol_type = other RNA
taattctgccgaaaaggcag

SEQ ID NO: 182 - DNA, 18 bp, synthetic construct
  source 1..18: mol_type = other DNA
ccaccccacatgttgata

SEQ ID NO: 183 - DNA, 18 bp, synthetic construct
  source 1..18: mol_type = other DNA
catcaacaccacagtggg

SEQ ID NO: 184 - DNA, 98 bp, synthetic construct
  source 1..98: mol_type = other DNA
ccacagtggggccactagggacaggattggtgacagaaaagccccatccttaggcctcctccttcctagtctcctgatattggtgtcgctgcaaccat

SEQ ID NO: 185 - DNA, 31 bp, synthetic construct
  source 1..31: mol_type = other DNA
ttggtgaagtctccttgaggtactaaattta

SEQ ID NO: 186 - DNA, 32 bp, synthetic construct
  source 1..32: mol_type = other DNA
tttttaaagtctcctttaatgaagtaaataaa

SEQ ID NO: 187 - DNA, 32 bp, synthetic construct
  source 1..32: mol_type = other DNA
ttggttaagtctcattaaagaatgtaaattta

SEQ ID NO: 188 - DNA, 32 bp, synthetic construct
  source 1..32: mol_type = other DNA
ttggttaagtcaatttctaggtatttaatttt

SEQ ID NO: 189 - DNA, 32 bp, synthetic construct
  source 1..32: mol_type = other DNA
ttgcctatgtctgctttgaggtattaaatatt

SEQ ID NO: 190 - DNA, 32 bp, synthetic construct
  source 1..32: mol_type = other DNA
ttcttcaagtctcctttcagatattaattttc

SEQ ID NO: 191 - DNA, 29 bp, synthetic construct
  source 1..29: mol_type = other DNA
aggtcccctccaccccacatgttgataca

SEQ ID NO: 192 - DNA, 29 bp, synthetic construct
  source 1..29: mol_type = other DNA
aggtcccctnccccccccatgtcgctgca

SEQ ID NO: 193 - protein, 13 aa, synthetic construct
LKHLLLEALKLAL

SEQ ID NO: 194 - protein, 13 aa, synthetic construct
LKHLLAEAVKVAL

SEQ ID NO: 195 - protein, 230 aa, Vibrio cholerae
MATSLPTPSAITTSALEYAFHTPARNLTKSRGKNIHRYVSVKMSKRITVESTLECDACYHFDFEPSIVRFCAQPIRFLYYLNGQSHSYVPDFLVQFDTNEFVLYEVKSAYAKNKPDFDVEWEAKVKAATELGLELELVEESDIRDTVVLNNLKRMHRYASKDELNNVHNSLLKIIKYNGAQSARCLGEQLGLKGRTVLPILCDLLSRCLLDTRLDKPLSLESRFELASYG

SEQ ID NO: 196 - protein, 209 aa, Pseudoalteromonas sp.
MYIRNLRKPSPNKNVFKFASTKVSSVVMCESSLEFDACFHHEYNDLIESFGSQPEGFKYEFMGKSLPYTPDALISYTDKTQKYHEYKPYSKIASPLFRAEFAAKRAASLKLGIDLVLVTDRQIRVNPILNNLKLLHRYSGVYGISGIQKELLSFIHKSGVIKLNDISSQVGIPIGETRSFLFGLMHKGLVKADLGCDDLTNNPTLWATP

SEQ ID NO: 197 - protein, 603 aa, Vibrio cholerae
MAKKGFSSFHRKAVSSQDTLESIELVSSANCLESVTYQDISAFPETIAVEINFRLSILRFLARKCETIVAKSIEPHRVELQQNYSRKIPSAITIYRWWLAFRKSDYNPISLAPNIKDRGNRETKVSTVVDSIMEQAVERVISGRKVNVSSAYKRVRRKVRQYNLTHGTKYTYPKYESVRKRVKKKTPFELLAAGKGERVAKREFRRMGKKILTSSVLERVEIDHTVVDLFAVHEEYRIPLGRPWLTQLVDCYSKAVIGFYLGFEPPSYVSVSLALKNAIQRKDDLISSYESIENEWLCYGIPDLLVTDNGKEFLSKAFDQACESLLINVHQNKVETPDNKPHVERNYGTINTSLLDDLPGKSFSQYLQREGYDSVGEATLTLNEIREIYLIWLVDIYHKKPNQRGTNCPNVAWKKGCQEWEPEEFSGSKDELDFKFAIVDYKQLTKVGITVYKELSYSNDRLAEYRGKKGNHKVQFKYNPECMAVIWVLDEDMNEYFTVNAIDYEYASRVSLWQHKYNMKYQAELNSAEYDEDKEIDAEIKIEEIADRSIVKTNKIRARRRGARHQENSARAKSISNANPASIQKHEDEIVSADNDDWDIDYV

SEQ ID NO: 198 - protein, 613 aa, Pseudoalteromonas sp.
MTDFFNEFDESLVPLKPQTPTQYVKLDDANLIQRDLDTFSDTFKNQALQRYKLISTIDKKLSRGWTQRNLDPILDELFKGGDVVRPNWRTVARWRKKYIESNGDIASLADKNHKMGNRTNRIKGDDKFFDKALERFLDAKRPTIATAYQYYKDLIVIENESIVEGKIPIISYNAFNKRIKAIPPYAVAVARHGKFKADQWFAYCAAHVPPTRILERVEIDHTPLDLILLDDELLIPIGRPYLTLLIDVFSGCVLGFHLSYKSPSYVSAAKAITHAIKPKSLDALNIELQNDWPCFGKFENLVVDNGAEFWSKNLEHACQSAGINIQYNPVRKPWLKPFIERFFGVMNEYFLPELPGKTFSNILEKEEYKPEKDAIMRFSTFVEEFHRWIADVYHQDSNSRETRIPIKRWQQGFDAYPPLTMNEEEETRFSMLMRISDSRTLTRNGFKYQELMYDSTALADYRKHYPQTKETVKKLIKVDPDDISKIYVYLEELESYLEVPCTDPTGYTDGLSIYEHKTIKKINREVIRESKDSLGLAKARMAIHERVKQEQEVFIESKTKAKITAVKKQAQIADVSNTGTSTIKVSEESAAPVQKHISNDNSDDWDDDLEAFE

SEQ ID NO: 199 - protein, 330 aa, Vibrio cholerae
MSETREARISRAKRAFVSTPSVRKILSYMDRCRDLSDLESEPTCMMVYGASGVGKTTVIKKYLNQNRRESEAGGDIIPVLHIELPDNAKPVDAARELLVEMGDPLALYETDLARLTKRLTELIPAVGVKLIIIDEFQHLVEERSNRVLTQVGNWLKMILNKTKCPIVIFGMPYSKVVLQANSQLHGRFSIQVELRPFSYQGGRGVFKTFLEYLDKALPFEKQAGLANESLQKKLYAFSQGNMRSLRNLIYQASIEAIDNQHETITEEDFVFASKLTSGDKPNSWKNPFEEGVEVTEDMLRPPPKDIGWEDYLRHSTPRVSKPGRNKNFFE

SEQ ID NO: 200 - protein, 333 aa, Pseudoalteromonas sp.
MNALTEIQIEKLRNFSDCIVMHPQIKTIFNDFDELRLNRKFQSDQQCMLLIGDTGVGKSHTINHYKKRVLATQNYSRNTMPVLVSRISRGKGLDATLVQMLADLELFGSSQIKKRGYKTDLTKKLVESLIKAQVELLIINEFQELIEFKSVQERQQIANGLKFISEEAKVPIVLVGMPWAAKIAEEPQWASRLVRKRKLEYFSLKNDSKYFRQYLMGLAKKMPFDVPPKLESKNTTIALFAACRGENRALKHLLLEALKLALSCNEYLENKHFITAYDKFDFFNDKEKLKSKNPFKQDIKDIEIYEVIKNSSYNPNALDPEDMLTDRVFAIVK

SEQ ID NO: 201 - protein, 394 aa, Vibrio cholerae
MFLQRPKPYSDESLESFFIRVANKNGYGDVHRFLEATKRFLQDIDHNGYQTFPTDITRINPYSAKNSSSARTASFLKLAQLTFNEPPELLGLAINRTNMKYSPSTSAVVRGAEVFPRSLLRTHSIPCCPLCLRENGYASYLWHFQGYEYCHSHNVPLITTCSCGKEFDYRVSGLKGICCKCKEPITLTSRENGHEAACTVSNWLAGHESKPLPNLPKSYRWGLVHWWMGIKDSEFDHFSFVQFFSNWPRSFHSIIEDEVEFNLEHAVVSTSELRLKDLLGRLFFGSIRLPERNLQHNIILGELLCYLENRLWQDKGLIANLKMNALEATVMLNCSLDQIASMVEQRILKPNRKSKPNSPLDVTDYLFHFGDIFCLWLAEFQSDEFNRSFYVSRW

SEQ ID NO: 202 - protein, 409 aa, Pseudoalteromonas sp.
MAFLFSPKARAFSDESLESYLLRVVSENFFDSYEGLSLAIREELHELDFEAHGAFPVDLKRLNVYHAKHNSHFRMRALGLLETLLDLPRYELQKLALLKSDIKFNSSVALYNNGVDIPLRFIRHHAEEAVDSIPVCSQCLAEEAYIKQSWHIKWVNACTKHQCALLHNCPECYAPINYIENESITHCSCGFELSCASTSPVNTLSIEHLNKLLDKGERNDSNPLFNNMTLTERFAALLWYQERYSQTDNFCLNDAVNYFSKWPAVFNTELDELSKNAEMKLIDLFNKTEFKFIFGDAILACPSTQKQSESHFIYRALLDYLVTLVESNPKTKKPNAADLLVSVLEAATLLGTSVEQVYRLYQNGILQTAFRHKMNQRINPYKGAFFLRHVIEYKTSFGNDKARMYLSAW

SEQ ID NO: 203 - protein, 640 aa, Vibrio cholerae
MQTLKELIASNPDDLTTELKRAFRPLTPHIAIDGNELDALTILVNLTDKTDDQKDLLDRAKCKQKLRDEKWWASCINCVNYRQSHNPKFPDIRSEGVIRTQALGELPSFLLSSSKIPPYHWSYSHDSKYVNKSAFLTNEFCWDGEISCLGELLKDADHPLWNTLKKLGCSQKTCKAMAKQLADITLTTINVTLAPNYLTQISLPDSDTSYISLSPVASLSMQSHFHQRLQDENRHSAITRFSRTTNMGVTAMTCGGAFRMLKSGAKFSSPPHHRLNSKRSWLTSEHVQSLKQYQRLNKSLIPENSRIALRRKYKIELQNMVRSWFAMQDHTLDSNILIQHLNHDLSYLGATKRFAYDPAMTKLFTELLKRELSNSINNGEQHTNGSFLVLPNIRVCGATALSSPVTVGIPSLTAFFGFVHAFERNINRTTSSFRVESFAICVHQLHVEKRGLTAEFVEKGDGTISAPATRDDWQCDVVFSLILNTNFAQHIDQDTLVTSLPKRLARGSAKIAIDDFKHINSFSTLETAIESLPIEAGRWLSLYAQSNNNLSDLLAAMTEDHQLMASCVGYHLLEEPKDKPNSLRGYKHAIAECIIGLINSITFSSETDPNTIFWSLKNYQNYLVVQPRSINDETTDKSSL

SEQ ID NO: 204 - protein, 695 aa, Pseudoalteromonas sp.
MHLKELLEITDTTERDRSLRRAFSPYTAMIDITGSEAVALIILLNLTYRKNQVDDLLDKKLAKQALKSEDHINKCIKEIAWFHTHNLKYPDIRVSKQNLAVEPPTLHSYVLSSANYPKAYGWSHNSAKVNFAKLFVSYFKWQNQVSWLAQVLATNSDNWKSAFTSLGLSVKAFKSLCVTVKNSLPEEAIPDSVDRYSRQIRMPYHDGYLAVTPVISHVVQSKIQQAAIDKRARFSNVEFTRPAAVSMLAASLGGVINVLNYPPYIRSKYHGLSNSRAFKLNNGQTVFNVEALLKPELIKALEGIIFSNNALALKQRRQQKVKNIKELRNTLLEWFSPVFEWRLDAIENGYDLEQLESASERLEYKILSLPDNELPSLTIPLFRLLNEMLGGVSMTQRYAFHPKLMSPLKAALQWLLVNLTDQKHVLIEEDDEHYRYLHLSGIRVFDAQALSNPYCSGIPSLTAVWGMIHSYQRKLNEALGTNVRFTSFSWFIRNYSAVAGKKLPELSLQGAQQSRLKRPGIIDGKYCDLVFDLIIHIDGYEDDLQAVDSKPDILKAHFPSNFAGGVMHQPELNSNINWCCLYSNENQLFEKLRRLPLSGCWVMPTEHKIQDLDELLLLLNSDSKLSPSMMGYMLLTEPMARVGSLERLHCYAEPAIGVVKYEAATSVRLKGIGNYFNSAFWMLDAQEKFMLMKKV

SEQ ID NO: 205 - protein, 352 aa, Vibrio cholerae
MKLPTNLAYERSIDPSDVCFFVVWPDDRKTPLTYNSRTLLGQMEAASLAYDVSGQPIKSATAEALAQGNPHQVDFCHVPYGASHIECSFSVSFSSELRQPYKCNSSKVKQTLVQLVELYETKIGWTELATRYLMNICNGKWLWKNTRKAYCWNIVLTPWPWNGEKVGFEDIRTNYTSRQDFKNNKNWSAIVEMIKTAFSSTDGLAIFEVRATLHLPTNAMVRPSQVFTEKESGSKSKSKTQNSRVFQSTTIDGERSPILGAFKTGAAIATIDDWYPEATEPLRVGRFGVHREDVTCYRHPSTGKDFFSILQQAEHYIEVLSANKTPAQETINDMHFLMANLIKGGMFQHKGD

SEQ ID NO: 206 - protein, 350 aa, Pseudoalteromonas sp.
MELCNILKYDRSLYPGKAVFFYKTADSDFVPLEADINKIRGPKSGFTEAFTPQFSPKNISPQDLTHNNILTLEECYVPPNVEHIFCRFSLRVQANSLVPSGCSDPEVFSLLKELAETFKECGGYKELAVRYCRNILIGTWLWRNQNTGNTQIEIKTSKGSCYLIDNTRKLAWESKWASDDLKVLEELSNEIESALTDPNVFWSADITAKIEASFCQEIYPSQILNDKVKQGEASKQFVKAKCADGRYAVSFNSVKIGAALQSIDDWWDEDASKRLRVHEFGADKEIGVARRPPDSEQNFYSIFKNTEWYLSALKNCITNKNEKIDPAIYYLFSVLIKGGMFQKKAEAKKA

SEQ ID NO: 207 - protein, 199 aa, Vibrio cholerae
VKWYYKTITFLPELCNNESLAAKCLRVLHGFNYQYETRNIGVSFPLWCDATVGKKISFVSKNKIELDLLLKQHYFVQMEQLQYFHISNTVLVPEDCTYVSFRRCQSIDKLTAAGLARKIRRLEKRALSRGEQFDPSSFAQKEHTAIAHYHSLGESSKQTNRNFRLNIRMLSEQPREGNSIFSSYGLSNSENSFQPVPLI

SEQ ID NO: 208 - protein, 203 aa, Pseudoalteromonas sp.
MQRYYFTVHFLPKQANLALLTGRCISIMHGFILKHNIEGMGVTFPAWSDSSIGNEIAFVYTDKEILNTLKDQAYFVDMQDCGFFKVSQVLAVPDSCEEVRFIRNQAVAKIFTGESRRRLKRLQKRALARGEDFNPKKIEAPREIDIFHRVAMTSKSSQEDYILHIQKQDVDCQAEPYFSNYGLASNEKFKGTVPDLSPSIDRN

1. A system for RNA-guided DNA modification, comprising:
a) an engineered Clustered Regularly Interspaced Short Palindromic Repeats (CRISPR)-associated transposon (CAST) system or one or more nucleic acids encoding the engineered CAST system, wherein the CAST system comprises at least one or all of:
i) at least one Cas protein;
ii) at least one transposon-associated protein; and
iii) at least one guide RNA (gRNA) complementary to at least a portion of a target nucleic acid sequence; and
b) at least one unfoldase protein, or a nucleic acid encoding thereof.

2. The system of claim 1, wherein the at least one Cas protein is derived from a Type I CRISPR-Cas system or a Type V CRISPR-Cas system.

3. The system of claim 1, wherein the at least one Cas protein comprises Cas5, Cas6, Cas7, and Cas8; or Cas12k.

4. The system of claim 1, wherein the at least one transposon protein is derived from a Tn7 or Tn7-like transposon system.

5. The system of claim 1, wherein the at least one transposon-associated protein comprises TnsA, TnsB, TnsC, or a combination thereof, and optionally TnsD and/or TniQ.

6. The system of claim 1, wherein the at least one gRNA is a non-naturally occurring gRNA.

7. The system of claim 1, wherein the at least one unfoldase protein comprises ClpX, or a homolog thereof.

8. The system of claim 1, wherein the at least one unfoldase protein is derived from same or different organism as that of the engineered CAST system.

9. The system of claim 1, wherein the one or more nucleic acids encoding the engineered CAST system comprises one or more messenger RNAs, one or more vectors, or a combination thereof.

10. A composition comprising the system of claim 1.

11. A cell comprising the system of claim 1.

12. A method for DNA integration, comprising contacting a target nucleic acid sequence with the system of claim 1 or a composition comprising thereof.

13. The method of claim 12, wherein the target nucleic acid sequence is in a cell and the contacting a target nucleic acid sequence comprises introducing the system into the cell.

14. The method of claim 13, wherein the cell is a prokaryotic cell or a eukaryotic cell.

15. The method of claim 13, wherein the introducing the system into the cell comprises administering the system to a subject.
